United States Patent Application Publication US 2025/0387517 A1 - sequence listing, part 2

SEQ ID NO: 19434 - protein, 70 aa, Synthetic construct
APEPGPPPSVITFAHPAPSVIVHGGSSSGGGGSGTASTGGSQAASVITYTAPPRPPEPAATPTSPATAVS

SEQ ID NO: 19435 - protein, 70 aa, Synthetic construct
APEPGPPPSVITFAHPAPSVIVHGGSSSGGGGSGTASTGGSQAASVITYTAPPRPPKKRETPTSPATAVS

SEQ ID NO: 19436 - protein, 70 aa, Synthetic construct
APEPGPPPSVITFAHPAPSVIVHGGSSSGGGGSGTASTGGSQAASVITYTAPPRPPKKREYPPPPATAVS

SEQ ID NO: 19437 - protein, 70 aa, Synthetic construct
APEPGPPPSVITFAHPAPSVIVHGGSSSGGGGSGTASTGGSQAASVITYTAPPRPPKKREYPPPPPEPAA

SEQ ID NO: 19438 - protein, 70 aa, Synthetic construct
QREEDDEDPDLIYVGVEHVHRDAEVLFVGMISNSKPVVSNILNRVTPGSNSRRKKGHFRQYPAHVSQPAN

SEQ ID NO: 19439 - protein, 70 aa, Synthetic construct
SPKKNDEDPDLIYVGVEHVHRDAEVLFVGMISNSKPVVSNILNRVTPGSNSRRKKGHFRQYPAHVSQPAN

SEQ ID NO: 19440 - protein, 70 aa, Synthetic construct
SPKKNLRESKLIYVGVEHVHRDAEVLFVGMISNSKPVVSNILNRVTPGSNSRRKKGHFRQYPAHVSQPAN

SEQ ID NO: 19441 - protein, 70 aa, Synthetic construct
SPKKNLRESKQREEDVEHVHRDAEVLFVGMISNSKPVVSNILNRVTPGSNSRRKKGHFRQYPAHVSQPAN

SEQ ID NO: 19442 - protein, 70 aa, Synthetic construct
SPKKNLRESKQREEDDEDPDRDAEVLFVGMISNSKPVVSNILNRVTPGSNSRRKKGHFRQYPAHVSQPAN

SEQ ID NO: 19443 - protein, 70 aa, Synthetic construct
SPKKNLRESKQREEDDEDPDLIYVGLFVGMISNSKPVVSNILNRVTPGSNSRRKKGHFRQYPAHVSQPAN

SEQ ID NO: 19444 - protein, 70 aa, Synthetic construct
SPKKNLRESKQREEDDEDPDLIYVGVEHVHISNSKPVVSNILNRVTPGSNSRRKKGHFRQYPAHVSQPAN

SEQ ID NO: 19445 - protein, 70 aa, Synthetic construct
SPKKNLRESKQREEDDEDPDLIYVGVEHVHRDAEVPVVSNILNRVTPGSNSRRKKGHFRQYPAHVSQPAN

SEQ ID NO: 19446 - protein, 70 aa, Synthetic construct
SPKKNLRESKQREEDDEDPDLIYVGVEHVHRDAEVLFVGMILNRVTPGSNSRRKKGHFRQYPAHVSQPAN

SEQ ID NO: 19447 - protein, 70 aa, Synthetic construct
SPKKNLRESKQREEDDEDPDLIYVGVEHVHRDAEVLFVGMISNSKTPGSNSRRKKGHFRQYPAHVSQPAN

SEQ ID NO: 19448 - protein, 70 aa, Synthetic construct
SPKKNLRESKQREEDDEDPDLIYVGVEHVHRDAEVLFVGMISNSKPVVSNSRRKKGHFRQYPAHVSQPAN

SEQ ID NO: 19449 - protein, 70 aa, Synthetic construct
SPKKNLRESKQREEDDEDPDLIYVGVEHVHRDAEVLFVGMISNSKPVVSNILNRVGHFRQYPAHVSQPAN

SEQ ID NO: 19450 - protein, 70 aa, Synthetic construct
SPKKNLRESKQREEDDEDPDLIYVGVEHVHRDAEVLFVGMISNSKPVVSNILNRVTPGSNYPAHVSQPAN

SEQ ID NO: 19451 - protein, 70 aa, Synthetic construct
SPKKNLRESKQREEDDEDPDLIYVGVEHVHRDAEVLFVGMISNSKPVVSNILNRVTPGSNSRRKKSQPAN

SEQ ID NO: 19452 - protein, 70 aa, Synthetic construct
SPKKNLRESKQREEDDEDPDLIYVGVEHVHRDAEVLFVGMISNSKPVVSNILNRVTPGSNSRRKKGHFRQ

SEQ ID NO: 19453 - protein, 70 aa, Synthetic construct
GHMHLHSDSKPFKCLYCPSKFTLKGNLTRHMKVKHGLGRGRIALAQTAGVLRSLEQEEPFDLSQKRRAKV

SEQ ID NO: 19454 - protein, 70 aa, Synthetic construct
GDSFALEKSLTQHYDRRSVRIEVTCNHCTKNLVFYNKCSLLSHARGHKEKGVVMQCSHLILKPVPADQMI

SEQ ID NO: 19455 - protein, 70 aa, Synthetic construct
SDVAALKSHICPICPMAFKSAPSTHSHAYTQHPGIKIGEPKIIYKCSMCDTVFTLQTLLYRHFDQHIENQ

SEQ ID NO: 19456 - protein, 70 aa, Synthetic construct
SDVAALKSHIQGSHCMAFKSAPSTHSHAYTQHPGIKIGEPKIIYKCSMCDTVFTLQTLLYRHFDQHIENQ

SEQ ID NO: 19457 - protein, 70 aa, Synthetic construct
SDVAALKSHIQGSHCEVFYKAPSTHSHAYTQHPGIKIGEPKIIYKCSMCDTVFTLQTLLYRHFDQHIENQ

SEQ ID NO: 19458 - protein, 70 aa, Synthetic construct
SDVAALKSHIQGSHCEVFYKCPICPSHAYTQHPGIKIGEPKIIYKCSMCDTVFTLQTLLYRHFDQHIENQ

SEQ ID NO: 19459 - protein, 70 aa, Synthetic construct
SDVAALKSHIQGSHCEVFYKCPICPMAFKSQHPGIKIGEPKIIYKCSMCDTVFTLQTLLYRHFDQHIENQ

SEQ ID NO: 19460 - protein, 70 aa, Synthetic construct
SDVAALKSHIQGSHCEVFYKCPICPMAFKSAPSTHKIGEPKIIYKCSMCDTVFTLQTLLYRHFDQHIENQ

SEQ ID NO: 19461 - protein, 70 aa, Synthetic construct
SDVAALKSHIQGSHCEVFYKCPICPMAFKSAPSTHSHAYTKIIYKCSMCDTVFTLQTLLYRHFDQHIENQ

SEQ ID NO: 19462 - protein, 70 aa, Synthetic construct
SDVAALKSHIQGSHCEVFYKCPICPMAFKSAPSTHSHAYTQHPGICSMCDTVFTLQTLLYRHFDQHIENQ

SEQ ID NO: 19463 - protein, 70 aa, Synthetic construct
SDVAALKSHIQGSHCEVFYKCPICPMAFKSAPSTHSHAYTQHPGIKIGEPKIIYKCSMCDTVFTLHIENQ

SEQ ID NO: 19464 - protein, 70 aa, Synthetic construct
SDVAALKSHIQGSHCEVFYKCPICPMAFKSAPSTHSHAYTQHPGIKIGEPKIIYKCSMCDTVFTLQTLLY

SEQ ID NO: 19465 - protein, 70 aa, Synthetic construct
PSRRPASLSPAAPAEAPAPEVYAGRPLLPSLGGPFPLLAPPLLPGLTRALPAAPRAGPQGPGGPWRPWLR

SEQ ID NO: 19466 - protein, 70 aa, Synthetic construct
HLAACASLSPAAPAEAPAPEVYAGRPLLPSLGGPFPLLAPPLLPGLTRALPAAPRAGPQGPGGPWRPWLR

SEQ ID NO: 19467 - protein, 70 aa, Synthetic construct
HLAACLRQLGAAPAEAPAPEVYAGRPLLPSLGGPFPLLAPPLLPGLTRALPAAPRAGPQGPGGPWRPWLR

SEQ ID NO: 19468 - protein, 70 aa, Synthetic construct
HLAACLRQLGPSRRPAPAPEVYAGRPLLPSLGGPFPLLAPPLLPGLTRALPAAPRAGPQGPGGPWRPWLR

SEQ ID NO: 19469 - protein, 70 aa, Synthetic construct
HLAACLRQLGPSRRPASLSPVYAGRPLLPSLGGPFPLLAPPLLPGLTRALPAAPRAGPQGPGGPWRPWLR

SEQ ID NO: 19470 - protein, 70 aa, Synthetic construct
HLAACLRQLGPSRRPASLSPAAPAEPLLPSLGGPFPLLAPPLLPGLTRALPAAPRAGPQGPGGPWRPWLR

SEQ ID NO: 19471 - protein, 70 aa, Synthetic construct
HLAACLRQLGPSRRPASLSPAAPAEAPAPELGGPFPLLAPPLLPGLTRALPAAPRAGPQGPGGPWRPWLR

SEQ ID NO: 19472 - protein, 70 aa, Synthetic construct
HLAACLRQLGPSRRPASLSPAAPAEAPAPEVYAGRPLLAPPLLPGLTRALPAAPRAGPQGPGGPWRPWLR

SEQ ID NO: 19473 - protein, 70 aa, Synthetic construct
HLAACLRQLGPSRRPASLSPAAPAEAPAPEVYAGRPLLPSPLLPGLTRALPAAPRAGPQGPGGPWRPWLR

SEQ ID NO: 19474 - protein, 70 aa, Synthetic construct
HLAACLRQLGPSRRPASLSPAAPAEAPAPEVYAGRPLLPSLGGPFLTRALPAAPRAGPQGPGGPWRPWLR

SEQ ID NO: 19475 - protein, 70 aa, Synthetic construct
HLAACLRQLGPSRRPASLSPAAPAEAPAPEVYAGRPLLPSLGGPFPLLAPPAAPRAGPQGPGGPWRPWLR

SEQ ID NO: 19476 - protein, 70 aa, Synthetic construct
HLAACLRQLGPSRRPASLSPAAPAEAPAPEVYAGRPLLPSLGGPFPLLAPPLLPGAGPQGPGGPWRPWLR

SEQ ID NO: 19477 - protein, 70 aa, Synthetic construct
HLAACLRQLGPSRRPASLSPAAPAEAPAPEVYAGRPLLPSLGGPFPLLAPPLLPGLTRALPGGPWRPWLR

SEQ ID NO: 19478 - protein, 70 aa, Synthetic construct
TTAGARRRRTRCRKCEACLRTECGECHFCKDMKKFGGPGRMKQSCIMRQCIAPVLPHTAVDTVEEEEGKF

SEQ ID NO: 19479 - protein, 70 aa, Synthetic construct
TTAGARRRRTRCRKCEACLRTECGECHFCKDMKKFGGPGRMKQSCIMRQCIAPVLPHTAVCLVCGEEGKF

SEQ ID NO: 19480 - protein, 70 aa, Synthetic construct
TTAGARRRRTRCRKCEACLRTECGECHFCKDMKKFGGPGRMKQSCIMRQCIAPVLPHTAVCLVCGEAGKE

SEQ ID NO: 19481 - protein, 70 aa, Synthetic construct
MKQSCIMRQCCLVCGEAGKEDTVEEEEGKFNLMLMECSICNEIIHPGCLKIKESEGVVNDELPNCWECPK

SEQ ID NO: 19482 - protein, 70 aa, Synthetic construct
MKQSCIMRQCIAPVLEAGKEDTVEEEEGKFNLMLMECSICNEIIHPGCLKIKESEGVVNDELPNCWECPK

SEQ ID NO: 19483 - protein, 70 aa, Synthetic construct
MKQSCIMRQCIAPVLPHTAVCLVCGEEGKFNLMLMECSICNEIIHPGCLKIKESEGVVNDELPNCWECPK

SEQ ID NO: 19484 - protein, 70 aa, Synthetic construct
MKQSCIMRQCIAPVLPHTAVCLVCGEAGKEDTVEEEEGKFNLMLMECSICIKESEGVVNDELPNCWECPK

SEQ ID NO: 19485 - protein, 70 aa, Synthetic construct
MKQSCIMRQCIAPVLPHTAVCLVCGEAGKEDTVEEEEGKFNLMLMECSICNEIIHGVVNDELPNCWECPK

SEQ ID NO: 19486 - protein, 70 aa, Synthetic construct
MKQSCIMRQCIAPVLPHTAVCLVCGEAGKEDTVEEEEGKFNLMLMECSICNEIIHPGCLKELPNCWECPK

SEQ ID NO: 19487 - protein, 70 aa, Synthetic construct
MKQSCIMRQCIAPVLPHTAVCLVCGEAGKEDTVEEEEGKFNLMLMECSICNEIIHPGCLKIKESEWECPK

SEQ ID NO: 19488 - protein, 70 aa, Synthetic construct
MKQSCIMRQCIAPVLPHTAVCLVCGEAGKEDTVEEEEGKFNLMLMECSICNEIIHPGCLKIKESEGVVND

SEQ ID NO: 19489 - protein, 70 aa, Synthetic construct
WKNAEDRMALANKPLRRFKQEPEDELPEAPPKTRESDHSRSSSPTAGPSTEGAEGPEEKKKVKMRRKRRL

SEQ ID NO: 19490 - protein, 70 aa, Synthetic construct
DKLFRDRMALANKPLRRFKQEPEDELPEAPPKTRESDHSRSSSPTAGPSTEGAEGPEEKKKVKMRRKRRL

SEQ ID NO: 19491 - protein, 70 aa, Synthetic construct
DKLFRKKRRSANKPLRRFKQEPEDELPEAPPKTRESDHSRSSSPTAGPSTEGAEGPEEKKKVKMRRKRRL

SEQ ID NO: 19492 - protein, 70 aa, Synthetic construct
DKLFRKKRRSWKNAEDRMALANKPLRRFKQEPEDESDHSRSSSPTAGPSTEGAEGPEEKKKVKMRRKRRL

SEQ ID NO: 19493 - protein, 70 aa, Synthetic construct
DKLFRKKRRSWKNAEDRMALANKPLRRFKQEPEDELPEAPSSSPTAGPSTEGAEGPEEKKKVKMRRKRRL

SEQ ID NO: 19494 - protein, 70 aa, Synthetic construct
DKLFRKKRRSWKNAEDRMALANKPLRRFKQEPEDELPEAPPKTREAGPSTEGAEGPEEKKKVKMRRKRRL

SEQ ID NO: 19495 - protein, 70 aa, Synthetic construct
DKLFRKKRRSWKNAEDRMALANKPLRRFKQEPEDELPEAPPKTRESDHSRSSSPTPEEKKKVKMRRKRRL

SEQ ID NO: 19496 - protein, 70 aa, Synthetic construct
DKLFRKKRRSWKNAEDRMALANKPLRRFKQEPEDELPEAPPKTRESDHSRSSSPTAGPSTKVKMRRKRRL

SEQ ID NO: 19497 - protein, 70 aa, Synthetic construct
DKLFRKKRRSWKNAEDRMALANKPLRRFKQEPEDELPEAPPKTRESDHSRSSSPTAGPSTEGAEGRKRRL

SEQ ID NO: 19498 - protein, 70 aa, Synthetic construct
DKLFRKKRRSWKNAEDRMALANKPLRRFKQEPEDELPEAPPKTRESDHSRSSSPTAGPSTEGAEGPEEKK

SEQ ID NO: 19499 - protein, 70 aa, Synthetic construct
PEIKLKITKTIQNGRELFESSLCGDTKSKHESRKEKRKKSNKHDSSRSEERKSHKIPKLEPEEQNRPNER

SEQ ID NO: 19500 - protein, 70 aa, Synthetic construct
PEIKLKITKTIQNGRELFESSLCGDLLNEVESRKEKRKKSNKHDSSRSEERKSHKIPKLEPEEQNRPNER

SEQ ID NO: 19501 - protein, 70 aa, Synthetic construct
PEIKLKITKTIQNGRELFESSLCGDLLNEVQASEHKRKKSNKHDSSRSEERKSHKIPKLEPEEQNRPNER

SEQ ID NO: 19502 - protein, 70 aa, Synthetic construct
PEIKLKITKTIQNGRELFESSLCGDLLNEVQASEHTKSKHNKHDSSRSEERKSHKIPKLEPEEQNRPNER

SEQ ID NO: 19503 - protein, 70 aa, Synthetic construct
PEIKLKITKTIQNGRELFESSLCGDLLNEVQASEHTKSKHESRKESRSEERKSHKIPKLEPEEQNRPNER

SEQ ID NO: 19504 - protein, 70 aa, Synthetic construct
PEIKLKITKTIQNGRELFESSLCGDLLNEVQASEHTKSKHESRKEKRKKSNKHDSIPKLEPEEQNRPNER

SEQ ID NO: 19505 - protein, 70 aa, Synthetic construct
TEVVPTVPQATVKTGLQKGASEISDSCKPLKKRSRASTDVEMTSSAYRDTSDSDSRGLSDLQVGFGKQVD

SEQ ID NO: 19506 - protein, 70 aa, Synthetic construct
TEVVPKKKIKTVKTGLQKGASEISDSCKPLKKRSRASTDVEMTSSAYRDTSDSDSRGLSDLQVGFGKQVD

SEQ ID NO: 19507 - protein, 70 aa, Synthetic construct
TEVVPKKKIKKEQVELQKGASEISDSCKPLKKRSRASTDVEMTSSAYRDTSDSDSRGLSDLQVGFGKQVD

SEQ ID NO: 19508 - protein, 70 aa, Synthetic construct
TEVVPKKKIKKEQVETVPQASEISDSCKPLKKRSRASTDVEMTSSAYRDTSDSDSRGLSDLQVGFGKQVD

SEQ ID NO: 19509 - protein, 70 aa, Synthetic construct
TEVVPKKKIKKEQVETVPQATVKTGSCKPLKKRSRASTDVEMTSSAYRDTSDSDSRGLSDLQVGFGKQVD

SEQ ID NO: 19510 - protein, 70 aa, Synthetic construct
TEVVPKKKIKKEQVETVPQATVKTGLQKGAKKRSRASTDVEMTSSAYRDTSDSDSRGLSDLQVGFGKQVD

SEQ ID NO: 19511 - protein, 70 aa, Synthetic construct
TEVVPKKKIKKEQVETVPQATVKTGLQKGASEISDASTDVEMTSSAYRDTSDSDSRGLSDLQVGFGKQVD

SEQ ID NO: 19512 - protein, 70 aa, Synthetic construct
TEVVPKKKIKKEQVETVPQATVKTGLQKGASEISDSCKPLEMTSSAYRDTSDSDSRGLSDLQVGFGKQVD

SEQ ID NO: 19513 - protein, 70 aa, Synthetic construct
TEVVPKKKIKKEQVETVPQATVKTGLQKGASEISDSCKPLKKRSRAYRDTSDSDSRGLSDLQVGFGKQVD

SEQ ID NO: 19514 - protein, 70 aa, Synthetic construct
TEVVPKKKIKKEQVETVPQATVKTGLQKGASEISDSCKPLKKRSRASTDVSDSDSRGLSDLQVGFGKQVD

SEQ ID NO: 19515 - protein, 70 aa, Synthetic construct
TEVVPKKKIKKEQVETVPQATVKTGLQKGASEISDSCKPLKKRSRASTDVEMTSSRGLSDLQVGFGKQVD

SEQ ID NO: 19516 - protein, 70 aa, Synthetic construct
TEVVPKKKIKKEQVETVPQATVKTGLQKGASEISDSCKPLKKRSRASTDVEMTSSAYRDTLQVGFGKQVD

SEQ ID NO: 19517 - protein, 70 aa, Synthetic construct
TEVVPKKKIKKEQVETVPQATVKTGLQKGASEISDSCKPLKKRSRASTDVEMTSSAYRDTSDSDSGKQVD

SEQ ID NO: 19518 - protein, 70 aa, Synthetic construct
TEVVPKKKIKKEQVETVPQATVKTGLQKGASEISDSCKPLKKRSRASTDVEMTSSAYRDTSDSDSRGLSD

SEQ ID NO: 19519 - protein, 70 aa, Synthetic construct
GTDKELSDLLDFSAMFSPPVNSGKTRPTTLGSSQFSGSGIDERGGTTSWGTSGQPSPSYDSSRGFTDSPH

SEQ ID NO: 19520 - protein, 70 aa, Synthetic construct
NPQQQRMAAIGTDKELSDLLDFSAMFSPPVGSSQFSGSGIDERGGTTSWGTSGQPSPSYDSSRGFTDSPH

SEQ ID NO: 19521 - protein, 70 aa, Synthetic construct
NPQQQRMAAIGTDKELSDLLDFSAMFSPPVNSGKTSGSGIDERGGTTSWGTSGQPSPSYDSSRGFTDSPH

SEQ ID NO: 19522 - protein, 70 aa, Synthetic construct
NPQQQRMAAIGTDKELSDLLDFSAMFSPPVNSGKTRPTTLDERGGTTSWGTSGQPSPSYDSSRGFTDSPH

SEQ ID NO: 19523 - protein, 70 aa, Synthetic construct
NPQQQRMAAIGTDKELSDLLDFSAMFSPPVNSGKTRPTTLGSSQFTTSWGTSGQPSPSYDSSRGFTDSPH

SEQ ID NO: 19524 - protein, 70 aa, Synthetic construct
NPQQQRMAAIGTDKELSDLLDFSAMFSPPVNSGKTRPTTLGSSQFSGSGITSGQPSPSYDSSRGFTDSPH

SEQ ID NO: 19525 - protein, 70 aa, Synthetic construct
NPQQQRMAAIGTDKELSDLLDFSAMFSPPVNSGKTRPTTLGSSQFSGSGIDERGGSPSYDSSRGFTDSPH

SEQ ID NO: 19526 - protein, 70 aa, Synthetic construct
NPQQQRMAAIGTDKELSDLLDFSAMFSPPVNSGKTRPTTLGSSQFSGSGIDERGGTTSWGSSRGFTDSPH

SEQ ID NO: 19527 - protein, 70 aa, Synthetic construct
NPQQQRMAAIGTDKELSDLLDFSAMFSPPVNSGKTRPTTLGSSQFSGSGIDERGGTTSWGTSGQPTDSPH

SEQ ID NO: 19528 - protein, 70 aa, Synthetic construct
NPQQQRMAAIGTDKELSDLLDFSAMFSPPVNSGKTRPTTLGSSQFSGSGIDERGGTTSWGTSGQPSPSYD

SEQ ID NO: 19529 - protein, 70 aa, Synthetic construct
IPSKEPKDGSPVQPSLLSLMKDRRLTLEQVVAIEALTQLSEAPSENSSPSKSEKDEESEQRTASLLNSCK

SEQ ID NO: 19530 - protein, 70 aa, Synthetic construct
EGDQPPKDGSPVQPSLLSLMKDRRLTLEQVVAIEALTQLSEAPSENSSPSKSEKDEESEQRTASLLNSCK

SEQ ID NO: 19531 - protein, 70 aa, Synthetic construct
EGDQPKTPENPVQPSLLSLMKDRRLTLEQVVAIEALTQLSEAPSENSSPSKSEKDEESEQRTASLLNSCK

SEQ ID NO: 19532 - protein, 70 aa, Synthetic construct
EGDQPKTPENIPSKELLSLMKDRRLTLEQVVAIEALTQLSEAPSENSSPSKSEKDEESEQRTASLLNSCK

SEQ ID NO: 19533 - protein, 70 aa, Synthetic construct
EGDQPKTPENIPSKEPKDGSPVQPSLLSLMKDRRLTLEQVVAIEALTQLSKSEKDEESEQRTASLLNSCK

SEQ ID NO: 19534 - protein, 70 aa, Synthetic construct
EGDQPKTPENIPSKEPKDGSPVQPSLLSLMKDRRLTLEQVVAIEALTQLSEAPSEEESEQRTASLLNSCK

SEQ ID NO: 19535 - protein, 70 aa, Synthetic construct
EGDQPKTPENIPSKEPKDGSPVQPSLLSLMKDRRLTLEQVVAIEALTQLSEAPSENSSPSRTASLLNSCK

SEQ ID NO: 19536 - protein, 70 aa, Synthetic construct
EGDQPKTPENIPSKEPKDGSPVQPSLLSLMKDRRLTLEQVVAIEALTQLSEAPSENSSPSKSEKDLNSCK

SEQ ID NO: 19537 - protein, 70 aa, Synthetic construct
EGDQPKTPENIPSKEPKDGSPVQPSLLSLMKDRRLTLEQVVAIEALTQLSEAPSENSSPSKSEKDEESEQ

SEQ ID NO: 19538 - protein, 70 aa, Synthetic construct
TDRRKAATLRERRRLKKINEAFEALKRRTVANPNQRLPKVEILRSAISYIERLQDLLHRLDQQEKMQELG

SEQ ID NO: 19539 - protein, 70 aa, Synthetic construct
CKTCKRKSAPTDRRKAATLRAFEALKRRTVANPNQRLPKVEILRSAISYIERLQDLLHRLDQQEKMQELG

SEQ ID NO: 19540 - protein, 70 aa, Synthetic construct
CKTCKRKSAPTDRRKAATLRERRRLKKINEAFEALKRRTVEILRSAISYIERLQDLLHRLDQQEKMQELG

SEQ ID NO: 19541 - protein, 70 aa, Synthetic construct
CKTCKRKSAPTDRRKAATLRERRRLKKINEAFEALKRRTVANPNQRLPKVEILRSLLHRLDQQEKMQELG

SEQ ID NO: 19542 - protein, 70 aa, Synthetic construct
CKTCKRKSAPTDRRKAATLRERRRLKKINEAFEALKRRTVANPNQRLPKVEILRSAISYIDQQEKMQELG

SEQ ID NO: 19543 - protein, 70 aa, Synthetic construct
CKTCKRKSAPTDRRKAATLRERRRLKKINEAFEALKRRTVANPNQRLPKVEILRSAISYIERLQDMQELG

SEQ ID NO: 19544 - protein, 70 aa, Synthetic construct
SASRRVGLSCANCQTTTTTLWRRNAEGEPVCNACGLYMKLHGVPRPLAMRKEGIQTRKRKPKNLNKSKTP

SEQ ID NO: 19545 - protein, 70 aa, Synthetic construct
RPLIKVGLSCANCQTTTTTLWRRNAEGEPVCNACGLYMKLHGVPRPLAMRKEGIQTRKRKPKNLNKSKTP

SEQ ID NO: 19546 - protein, 70 aa, Synthetic construct
ASSQRPTSFFIEDILLHKPKPLREVAPDHFASSLASRVPLLDYGYPLMPTPTLLAPHAHHPLHKGDHHHP

SEQ ID NO: 19547 - protein, 70 aa, Synthetic construct
NLNFTPTSFFIEDILLHKPKPLREVAPDHFASSLASRVPLLDYGYPLMPTPTLLAPHAHHPLHKGDHHHP

SEQ ID NO: 19548 - protein, 70 aa, Synthetic construct
NLNFTSPLHPASSQRPTSFFIEDILAPDHFASSLASRVPLLDYGYPLMPTPTLLAPHAHHPLHKGDHHHP

SEQ ID NO: 19549 - protein, 70 aa, Synthetic construct
NLNFTSPLHPASSQRPTSFFIEDILLHKPKASSLASRVPLLDYGYPLMPTPTLLAPHAHHPLHKGDHHHP

SEQ ID NO: 19550 - protein, 70 aa, Synthetic construct
NLNFTSPLHPASSQRPTSFFIEDILLHKPKPLREVSRVPLLDYGYPLMPTPTLLAPHAHHPLHKGDHHHP

SEQ ID NO: 19551 - protein, 70 aa, Synthetic construct
NLNFTSPLHPASSQRPTSFFIEDILLHKPKPLREVAPDHFLDYGYPLMPTPTLLAPHAHHPLHKGDHHHP

SEQ ID NO: 19552 - protein, 70 aa, Synthetic construct
NLNFTSPLHPASSQRPTSFFIEDILLHKPKPLREVAPDHFASSLAPLMPTPTLLAPHAHHPLHKGDHHHP

SEQ ID NO: 19553 - protein, 70 aa, Synthetic construct
NLNFTSPLHPASSQRPTSFFIEDILLHKPKPLREVAPDHFASSLASRVPLPTLLAPHAHHPLHKGDHHHP

SEQ ID NO: 19554 - protein, 70 aa, Synthetic construct
NLNFTSPLHPASSQRPTSFFIEDILLHKPKPLREVAPDHFASSLASRVPLLDYGYPHAHHPLHKGDHHHP

SEQ ID NO: 19555 - protein, 70 aa, Synthetic construct
NLNFTSPLHPASSQRPTSFFIEDILLHKPKPLREVAPDHFASSLASRVPLLDYGYPLMPTPLHKGDHHHP

SEQ ID NO: 19556 - protein, 70 aa, Synthetic construct
NLNFTSPLHPASSQRPTSFFIEDILLHKPKPLREVAPDHFASSLASRVPLLDYGYPLMPTPTLLADHHHP

SEQ ID NO: 19557 - protein, 70 aa, Synthetic construct
NLNFTSPLHPASSQRPTSFFIEDILLHKPKPLREVAPDHFASSLASRVPLLDYGYPLMPTPTLLAPHAHH

SEQ ID NO: 19558 - protein, 70 aa, Synthetic construct
AGAYIQNEHSYQVGSALLWKRRAEAALDALDKAQRQLQACKRREQRLRLRLTKLQQERAREKRAQADARQ

SEQ ID NO: 19559 - protein, 70 aa, Synthetic construct
SAYMLQNEHSYQVGSALLWKRRAEAALDALDKAQRQLQACKRREQRLRLRLTKLQQERAREKRAQADARQ

SEQ ID NO: 19560 - protein, 70 aa, Synthetic construct
SAYMLRLPPPYQVGSALLWKRRAEAALDALDKAQRQLQACKRREQRLRLRLTKLQQERAREKRAQADARQ

SEQ ID NO: 19561 - protein, 70 aa, Synthetic construct
SAYMLRLPPPAGAYIALLWKRRAEAALDALDKAQRQLQACKRREQRLRLRLTKLQQERAREKRAQADARQ

SEQ ID NO: 19562 - protein, 70 aa, Synthetic construct
SAYMLRLPPPAGAYIQNEHSYQVGSALLWKRRAEAALDALDKAQRRLRLRLTKLQQERAREKRAQADARQ

SEQ ID NO: 19563 - protein, 70 aa, Synthetic construct
SAYMLRLPPPAGAYIQNEHSYQVGSALLWKRRAEAALDALDKAQRQLQACLTKLQQERAREKRAQADARQ

SEQ ID NO: 19564 - protein, 70 aa, Synthetic construct
SAYMLRLPPPAGAYIQNEHSYQVGSALLWKRRAEAALDALDKAQRQLQACKRREQRLRLREKRAQADARQ

SEQ ID NO: 19565 - protein, 70 aa, Synthetic construct
SAYMLRLPPPAGAYIQNEHSYQVGSALLWKRRAEAALDALDKAQRQLQACKRREQRLRLRLTKLQADARQ

SEQ ID NO: 19566 - protein, 70 aa, Synthetic construct
SAYMLRLPPPAGAYIQNEHSYQVGSALLWKRRAEAALDALDKAQRQLQACKRREQRLRLRLTKLQQERAR

SEQ ID NO: 19567 - protein, 70 aa, Synthetic construct
ACDKDGQTDSAAEESSSQETSKGLGPNMSSTPAHEVGRRTSVLFSKKNPKTAGPPKRPGRPPKNRESQMT

SEQ ID NO: 19568 - protein, 70 aa, Synthetic construct
SRGSLGQTDSAAEESSSQETSKGLGPNMSSTPAHEVGRRTSVLFSKKNPKTAGPPKRPGRPPKNRESQMT

SEQ ID NO: 19569 - protein, 70 aa, Synthetic construct
SRGSLTPHPAAAEESSSQETSKGLGPNMSSTPAHEVGRRTSVLFSKKNPKTAGPPKRPGRPPKNRESQMT

SEQ ID NO: 19570 - protein, 70 aa, Synthetic construct
SRGSLTPHPAACDKDSSQETSKGLGPNMSSTPAHEVGRRTSVLFSKKNPKTAGPPKRPGRPPKNRESQMT

SEQ ID NO: 19571 - protein, 70 aa, Synthetic construct
SRGSLTPHPAACDKDGQTDSSKGLGPNMSSTPAHEVGRRTSVLFSKKNPKTAGPPKRPGRPPKNRESQMT

SEQ ID NO: 19572 - protein, 70 aa, Synthetic construct
SRGSLTPHPAACDKDGQTDSAAEESPNMSSTPAHEVGRRTSVLFSKKNPKTAGPPKRPGRPPKNRESQMT

SEQ ID NO: 19573 - protein, 70 aa, Synthetic construct
SRGSLTPHPAACDKDGQTDSAAEESSSQETTPAHEVGRRTSVLFSKKNPKTAGPPKRPGRPPKNRESQMT

SEQ ID NO: 19574 - protein, 70 aa, Synthetic construct
SRGSLTPHPAACDKDGQTDSAAEESSSQETSKGLGVGRRTSVLFSKKNPKTAGPPKRPGRPPKNRESQMT

SEQ ID NO: 19575 - protein, 70 aa, Synthetic construct
SRGSLTPHPAACDKDGQTDSAAEESSSQETSKGLGPNMSSTPAHEVGRRTSVLFSKKNPKPPKNRESQMT

SEQ ID NO: 19576 - protein, 70 aa, Synthetic construct
SRGSLTPHPAACDKDGQTDSAAEESSSQETSKGLGPNMSSTPAHEVGRRTSVLFSKKNPKTAGPPKRPGR

SEQ ID NO: 19577 - protein, 70 aa, Synthetic construct
VVKTLCWATDGNLMASASVDNTAIIWDVSKGQKISIFNEHKSYVQGVTWDPLGQYVATLSCDRVLRVYSI

SEQ ID NO: 19578 - protein, 70 aa, Synthetic construct
GGGLFPNDMYDLHDLSKAELAAPQLIMLANVALTGEVNGSCCDYLVGEERQMAELMPVGDNNFSDSEEGE

SEQ ID NO: 19579 - protein, 70 aa, Synthetic construct
GGGLFTSSGNIGMALSKAELAAPQLIMLANVALTGEVNGSCCDYLVGEERQMAELMPVGDNNFSDSEEGE

SEQ ID NO: 19580 - protein, 70 aa, Synthetic construct
GGGLFTSSGNIGMALPNDMYAAPQLIMLANVALTGEVNGSCCDYLVGEERQMAELMPVGDNNFSDSEEGE

SEQ ID NO: 19581 - protein, 70 aa, Synthetic construct
GGGLFTSSGNIGMALPNDMYDLHDLIMLANVALTGEVNGSCCDYLVGEERQMAELMPVGDNNFSDSEEGE

SEQ ID NO: 19582 - protein, 70 aa, Synthetic construct
GGGLFTSSGNIGMALPNDMYDLHDLSKAELAAPQLIMLANVALTGVGEERQMAELMPVGDNNFSDSEEGE

SEQ ID NO: 19583 - protein, 70 aa, Synthetic construct
GGGLFTSSGNIGMALPNDMYDLHDLSKAELAAPQLIMLANVALTGEVNGSCCDYLVGEERQMAELSEEGE

SEQ ID NO: 19584 - protein, 70 aa, Synthetic construct
DDSGLHGARPVPQESSRKNAKEALAVKAAKGDFVCIFCDRSFRKGKDYSKHLNRHLVNVYYLEEAAQGQE

SEQ ID NO: 19585 - protein, 70 aa, Synthetic construct
DLSDNHGARPVPQESSRKNAKEALAVKAAKGDFVCIFCDRSFRKGKDYSKHLNRHLVNVYYLEEAAQGQE

SEQ ID NO: 19586 - protein, 70 aa, Synthetic construct
DLSDNMSEGSVPQESSRKNAKEALAVKAAKGDFVCIFCDRSFRKGKDYSKHLNRHLVNVYYLEEAAQGQE

SEQ ID NO: 19587 - protein, 70 aa, Synthetic construct
DLSDNMSEGSDDSGLSRKNAKEALAVKAAKGDFVCIFCDRSFRKGKDYSKHLNRHLVNVYYLEEAAQGQE

SEQ ID NO: 19588 - protein, 70 aa, Synthetic construct
DLSDNMSEGSDDSGLHGARPKEALAVKAAKGDFVCIFCDRSFRKGKDYSKHLNRHLVNVYYLEEAAQGQE

SEQ ID NO: 19589 - protein, 70 aa, Synthetic construct
DLSDNMSEGSDDSGLHGARPVPQESVKAAKGDFVCIFCDRSFRKGKDYSKHLNRHLVNVYYLEEAAQGQE

SEQ ID NO: 19590 - protein, 70 aa, Synthetic construct
DLSDNMSEGSDDSGLHGARPVPQESSRKNAGDFVCIFCDRSFRKGKDYSKHLNRHLVNVYYLEEAAQGQE

SEQ ID NO: 19591 - protein, 70 aa, Synthetic construct
DLSDNMSEGSDDSGLHGARPVPQESSRKNAKEALAVKAAKGDFVCIFCDRSFRKGKDYSKHLNRHAQGQE

SEQ ID NO: 19592 - protein, 70 aa, Synthetic construct
DLSDNMSEGSDDSGLHGARPVPQESSRKNAKEALAVKAAKGDFVCIFCDRSFRKGKDYSKHLNRHLVNVY

SEQ ID NO: 19593 - protein, 70 aa, Synthetic construct
EEEDDDGDEVPVPSFGEAMAYFAMVKRYLTSFPIDDRVQSHILHLEHDLVHVTRKNHARQAGVRGLGHQS

SEQ ID NO: 19594 - protein, 70 aa, Synthetic construct
EEEDDEDEDDPVPSFGEAMAYFAMVKRYLTSFPIDDRVQSHILHLEHDLVHVTRKNHARQAGVRGLGHQS

SEQ ID NO: 19595 - protein, 70 aa, Synthetic construct
EEEDDEDEDDDDDEEDGDEVPVPSFGEAMAYFAMVKRYLTSFPIDDRVQSHILHLEHDLVHVTRKLGHQS

SEQ ID NO: 19596 - protein, 70 aa, Synthetic construct
EEEDDEDEDDDDDEEDGDEVPVPSFGEAMAYFAMVKRYLTSFPIDDRVQSHILHLEHDLVHVTRKNHARQ

SEQ ID NO: 19597 - protein, 70 aa, Synthetic construct
SDPVEWTVMDVVEYFTEAGFPEQATAFQEQEIDGKSLLLMQRTDVLTGLSIRLGPALKIYEHHIKVLQQG

SEQ ID NO: 19598 - protein, 70 aa, Synthetic construct
MSNPYPRSHPYSPLPGLASVPGHMALPRPGVIKTIGTTVGRRRRDEQLSPEEEEKRRIRRERNKLAAAKC

SEQ ID NO: 19599 - protein, 70 aa, Synthetic construct
WMVQPPRSHPYSPLPGLASVPGHMALPRPGVIKTIGTTVGRRRRDEQLSPEEEEKRRIRRERNKLAAAKC

SEQ ID NO: 19600 - protein, 70 aa, Synthetic construct
WMVQPTVITSYSPLPGLASVPGHMALPRPGVIKTIGTTVGRRRRDEQLSPEEEEKRRIRRERNKLAAAKC

SEQ ID NO: 19601 - protein, 70 aa, Synthetic construct
WMVQPTVITSMSNPYGLASVPGHMALPRPGVIKTIGTTVGRRRRDEQLSPEEEEKRRIRRERNKLAAAKC

SEQ ID NO: 19602 - protein, 70 aa, Synthetic construct
WMVQPTVITSMSNPYPRSHPPGHMALPRPGVIKTIGTTVGRRRRDEQLSPEEEEKRRIRRERNKLAAAKC

SEQ ID NO: 19603 - protein, 70 aa, Synthetic construct
WMVQPTVITSMSNPYPRSHPYSPLPLPRPGVIKTIGTTVGRRRRDEQLSPEEEEKRRIRRERNKLAAAKC

SEQ ID NO: 19604 - protein, 70 aa, Synthetic construct
WMVQPTVITSMSNPYPRSHPYSPLPGLASVPGHMALPRPGVIKTIEQLSPEEEEKRRIRRERNKLAAAKC

SEQ ID NO: 19605 - protein, 70 aa, Synthetic construct
WMVQPTVITSMSNPYPRSHPYSPLPGLASVPGHMALPRPGVIKTIGTTVGEEEEKRRIRRERNKLAAAKC

SEQ ID NO: 19606 - protein, 70 aa, Synthetic construct
WMVQPTVITSMSNPYPRSHPYSPLPGLASVPGHMALPRPGVIKTIGTTVGRRRRDRRIRRERNKLAAAKC

SEQ ID NO: 19607 - protein, 70 aa, Synthetic construct
WMVQPTVITSMSNPYPRSHPYSPLPGLASVPGHMALPRPGVIKTIGTTVGRRRRDEQLSPERNKLAAAKC

SEQ ID NO: 19608 - protein, 70 aa, Synthetic construct
WMVQPTVITSMSNPYPRSHPYSPLPGLASVPGHMALPRPGVIKTIGTTVGRRRRDEQLSPEEEEKAAAKC

SEQ ID NO: 19609 - protein, 70 aa, Synthetic construct
WMVQPTVITSMSNPYPRSHPYSPLPGLASVPGHMALPRPGVIKTIGTTVGRRRRDEQLSPEEEEKRRIRR

SEQ ID NO: 19610 - protein, 70 aa, Synthetic construct
GGGSVGAVVVKQEPLEEDSPSSSSAGLDKAQRSVIKPISIAGGFYGEEPLHTPIVVTSTPAVTPGTSNLV

SEQ ID NO: 19611 - protein, 70 aa, Synthetic construct
PAPGLGAVVVKQEPLEEDSPSSSSAGLDKAQRSVIKPISIAGGFYGEEPLHTPIVVTSTPAVTPGTSNLV

SEQ ID NO: 19612 - protein, 70 aa, Synthetic construct
PAPGLQPMRSGGGSVGAVVVKQEPLGLDKAQRSVIKPISIAGGFYGEEPLHTPIVVTSTPAVTPGTSNLV

SEQ ID NO: 19613 - protein, 70 aa, Synthetic construct
PAPGLQPMRSGGGSVGAVVVKQEPLEEDSPQRSVIKPISIAGGFYGEEPLHTPIVVTSTPAVTPGTSNLV

SEQ ID NO: 19614 - protein, 70 aa, Synthetic construct
PAPGLQPMRSGGGSVGAVVVKQEPLEEDSPSSSSAKPISIAGGFYGEEPLHTPIVVTSTPAVTPGTSNLV

SEQ ID NO: 19615 - protein, 70 aa, Synthetic construct
PAPGLQPMRSGGGSVGAVVVKQEPLEEDSPSSSSAGLDKAAGGFYGEEPLHTPIVVTSTPAVTPGTSNLV

SEQ ID NO: 19616 - protein, 70 aa, Synthetic construct
PAPGLQPMRSGGGSVGAVVVKQEPLEEDSPSSSSAGLDKAQRSVIGEEPLHTPIVVTSTPAVTPGTSNLV

SEQ ID NO: 19617 - protein, 70 aa, Synthetic construct
PAPGLQPMRSGGGSVGAVVVKQEPLEEDSPSSSSAGLDKAQRSVIKPISIHTPIVVTSTPAVTPGTSNLV

SEQ ID NO: 19618 - protein, 70 aa, Synthetic construct
PAPGLQPMRSGGGSVGAVVVKQEPLEEDSPSSSSAGLDKAQRSVIKPISIAGGFYVTSTPAVTPGTSNLV

SEQ ID NO: 19619 - protein, 70 aa, Synthetic construct
PAPGLQPMRSGGGSVGAVVVKQEPLEEDSPSSSSAGLDKAQRSVIKPISIAGGFYGEEPLAVTPGTSNLV

SEQ ID NO: 19620 - protein, 70 aa, Synthetic construct
PAPGLQPMRSGGGSVGAVVVKQEPLEEDSPSSSSAGLDKAQRSVIKPISIAGGFYGEEPLHTPIVTSNLV

SEQ ID NO: 19621 - protein, 70 aa, Synthetic construct
PAPGLQPMRSGGGSVGAVVVKQEPLEEDSPSSSSAGLDKAQRSVIKPISIAGGFYGEEPLHTPIVVTSTP

SEQ ID NO: 19622 - protein, 70 aa, Synthetic construct
VPPAGPEASESTTDENEDDIQFVSEGPLRPVLEYIDLVSSDDEEPSTSYTDRMPESKVPSSENHRPEMCS

SEQ ID NO: 19623 - protein, 70 aa, Synthetic construct
GDPGSPEASESTTDENEDDIQFVSEGPLRPVLEYIDLVSSDDEEPSTSYTDRMPESKVPSSENHRPEMCS

SEQ ID NO: 19624 - protein, 70 aa, Synthetic construct
GDPGSEIIESSTTDENEDDIQFVSEGPLRPVLEYIDLVSSDDEEPSTSYTDRMPESKVPSSENHRPEMCS

SEQ ID NO: 19625 - protein, 70 aa, Synthetic construct
GDPGSEIIESVPPAGNEDDIQFVSEGPLRPVLEYIDLVSSDDEEPSTSYTDRMPESKVPSSENHRPEMCS

SEQ ID NO: 19626 - protein, 70 aa, Synthetic construct
GDPGSEIIESVPPAGPEASEQFVSEGPLRPVLEYIDLVSSDDEEPSTSYTDRMPESKVPSSENHRPEMCS

SEQ ID NO: 19627 - protein, 70 aa, Synthetic construct
GDPGSEIIESVPPAGPEASESTTDENEDDIQFVSEGPLRPVLEYIDLVSSDRMPESKVPSSENHRPEMCS

SEQ ID NO: 19628 - protein, 70 aa, Synthetic construct
GDPGSEIIESVPPAGPEASESTTDENEDDIQFVSEGPLRPVLEYIDLVSSDDEEPSKVPSSENHRPEMCS

SEQ ID NO: 19629 - protein, 70 aa, Synthetic construct
GDPGSEIIESVPPAGPEASESTTDENEDDIQFVSEGPLRPVLEYIDLVSSDDEEPSTSYTSENHRPEMCS

SEQ ID NO: 19630 - protein, 70 aa, Synthetic construct
GDPGSEIIESVPPAGPEASESTTDENEDDIQFVSEGPLRPVLEYIDLVSSDDEEPSTSYTDRMPEPEMCS

SEQ ID NO: 19631 - protein, 70 aa, Synthetic construct
GDPGSEIIESVPPAGPEASESTTDENEDDIQFVSEGPLRPVLEYIDLVSSDDEEPSTSYTDRMPESKVPS

SEQ ID NO: 19632 - protein, 70 aa, Synthetic construct
EAPKKLSLSFSIEAILKRPARRSDMDRPEGPGEEGPGEAAASGSGLEKPPKDQPQEGRKSKRRVRTTFTT

SEQ ID NO: 19633 - protein, 70 aa, Synthetic construct
GMERNLSLSFSIEAILKRPARRSDMDRPEGPGEEGPGEAAASGSGLEKPPKDQPQEGRKSKRRVRTTFTT

SEQ ID NO: 19634 - protein, 70 aa, Synthetic construct
GMERNSLGCCEAPKKLSLSFSIEAILKRPAPGEEGPGEAAASGSGLEKPPKDQPQEGRKSKRRVRTTFTT

SEQ ID NO: 19635 - protein, 70 aa, Synthetic construct
GMERNSLGCCEAPKKLSLSFSIEAILKRPARRSDMPGEAAASGSGLEKPPKDQPQEGRKSKRRVRTTFTT

SEQ ID NO: 19636 - protein, 70 aa, Synthetic construct
GMERNSLGCCEAPKKLSLSFSIEAILKRPARRSDMDRPEGASGSGLEKPPKDQPQEGRKSKRRVRTTFTT

SEQ ID NO: 19637 - protein, 70 aa, Synthetic construct
GMERNSLGCCEAPKKLSLSFSIEAILKRPARRSDMDRPEGPGEEGLEKPPKDQPQEGRKSKRRVRTTFTT

SEQ ID NO: 19638 - protein, 70 aa, Synthetic construct
GMERNSLGCCEAPKKLSLSFSIEAILKRPARRSDMDRPEGPGEEGPGEAAKDQPQEGRKSKRRVRTTFTT

SEQ ID NO: 19639 - protein, 70 aa, Synthetic construct
GMERNSLGCCEAPKKLSLSFSIEAILKRPARRSDMDRPEGPGEEGPGEAAASGSGEGRKSKRRVRTTFTT

SEQ ID NO: 19640 - protein, 70 aa, Synthetic construct
GMERNSLGCCEAPKKLSLSFSIEAILKRPARRSDMDRPEGPGEEGPGEAAASGSGLEKPPKRRVRTTFTT

SEQ ID NO: 19641 - protein, 70 aa, Synthetic construct
GMERNSLGCCEAPKKLSLSFSIEAILKRPARRSDMDRPEGPGEEGPGEAAASGSGLEKPPKDQPQTTFTT

SEQ ID NO: 19642 - protein, 70 aa, Synthetic construct
GMERNSLGCCEAPKKLSLSFSIEAILKRPARRSDMDRPEGPGEEGPGEAAASGSGLEKPPKDQPQEGRKS

SEQ ID NO: 19643 - protein, 70 aa, Synthetic construct
MSITSDEVNFLVYRYLQESGFSHSAFTFGIESHISQSNINSILQKGLQYVEAEISINEDGTVFDGRPIES

SEQ ID NO: 19644 - protein, 70 aa, Synthetic construct
MSITSDEVNFLVYRYLQESGFSHSAFTFGIESHISQSNINGTLVPGLQYVEAEISINEDGTVFDGRPIES

SEQ ID NO: 19645 - protein, 70 aa, Synthetic construct
MSITSDEVNFLVYRYLQESGFSHSAFTFGIESHISQSNINGTLVPPAALIEAEISINEDGTVFDGRPIES

SEQ ID NO: 19646 - protein, 70 aa, Synthetic construct
MSITSDEVNFLVYRYLQESGFSHSAFTFGIESHISQSNINGTLVPPAALISILQKINEDGTVFDGRPIES

SEQ ID NO: 19647 - protein, 70 aa, Synthetic construct
MSITSDEVNFLVYRYLQESGFSHSAFTFGIESHISQSNINGTLVPPAALISILQKGLQYVTVFDGRPIES

SEQ ID NO: 19648 - protein, 70 aa, Synthetic construct
MSITSDEVNFLVYRYLQESGFSHSAFTFGIESHISQSNINGTLVPPAALISILQKGLQYVEAEISRPIES

SEQ ID NO: 19649 - protein, 70 aa, Synthetic construct
MSITSDEVNFLVYRYLQESGFSHSAFTFGIESHISQSNINGTLVPPAALISILQKGLQYVEAEISINEDG

SEQ ID NO: 19650 - protein, 70 aa, Synthetic construct
EPLASNIQVLLQAAEFLERRLCPHRSPGPIHRRKKRPPQAPGAQDSGRSVHNELEKRRRAQLKRCLERLK

SEQ ID NO: 19651 - protein, 70 aa, Synthetic construct
EPLASNIQVLLQAAEFLERREREAESPGPIHRRKKRPPQAPGAQDSGRSVHNELEKRRRAQLKRCLERLK

SEQ ID NO: 19652 - protein, 70 aa, Synthetic construct
EPLASNIQVLLQAAEFLERREREAEHGYASHRRKKRPPQAPGAQDSGRSVHNELEKRRRAQLKRCLERLK

SEQ ID NO: 19653 - protein, 70 aa, Synthetic construct
EPLASNIQVLLQAAEFLERREREAEHGYASLCPHRRPPQAPGAQDSGRSVHNELEKRRRAQLKRCLERLK

SEQ ID NO: 19654 - protein, 70 aa, Synthetic construct
EPLASNIQVLLQAAEFLERREREAEHGYASLCPHRSPGPIPGAQDSGRSVHNELEKRRRAQLKRCLERLK

SEQ ID NO: 19655 - protein, 70 aa, Synthetic construct
EPLASNIQVLLQAAEFLERREREAEHGYASLCPHRSPGPIHRRKKSGRSVHNELEKRRRAQLKRCLERLK

SEQ ID NO: 19656 - protein, 70 aa, Synthetic construct
EPLASNIQVLLQAAEFLERREREAEHGYASLCPHRSPGPIHRRKKRPPQAHNELEKRRRAQLKRCLERLK

SEQ ID NO: 19657 - protein, 70 aa, Synthetic construct
EPLASNIQVLLQAAEFLERREREAEHGYASLCPHRSPGPIHRRKKRPPQAPGAQDKRRRAQLKRCLERLK

SEQ ID NO: 19658 - protein, 70 aa, Synthetic construct
EPLASNIQVLLQAAEFLERREREAEHGYASLCPHRSPGPIHRRKKRPPQAPGAQDSGRSVQLKRCLERLK

SEQ ID NO: 19659 - protein, 70 aa, Synthetic construct
EPLASNIQVLLQAAEFLERREREAEHGYASLCPHRSPGPIHRRKKRPPQAPGAQDSGRSVHNELELERLK

SEQ ID NO: 19660 - protein, 70 aa, Synthetic construct
EPLASNIQVLLQAAEFLERREREAEHGYASLCPHRSPGPIHRRKKRPPQAPGAQDSGRSVHNELEKRRRA

SEQ ID NO: 19661 - protein, 70 aa, Synthetic construct
LMFDPVPVKQEAMDPESMKPNKYGVIYSTPLPEKFFQTPEGLSHGIQMEPVDLTVNKRSSPPSAGNSPSS

SEQ ID NO: 19662 - protein, 70 aa, Synthetic construct
LMFDPVPVKQEAMDPVSVSYNKYGVIYSTPLPEKFFQTPEGLSHGIQMEPVDLTVNKRSSPPSAGNSPSS

SEQ ID NO: 19663 - protein, 70 aa, Synthetic construct
LMFDPVPVKQEAMDPVSVSYPSNYMIYSTPLPEKFFQTPEGLSHGIQMEPVDLTVNKRSSPPSAGNSPSS

SEQ ID NO: 19664 - protein, 70 aa, Synthetic construct
LMFDPVPVKQEAMDPVSVSYPSNYMESMKPLPEKFFQTPEGLSHGIQMEPVDLTVNKRSSPPSAGNSPSS

SEQ ID NO: 19665 - protein, 70 aa, Synthetic construct
LMFDPVPVKQEAMDPVSVSYPSNYMESMKPNKYGVFQTPEGLSHGIQMEPVDLTVNKRSSPPSAGNSPSS

SEQ ID NO: 19666 - protein, 70 aa, Synthetic construct
LMFDPVPVKQEAMDPVSVSYPSNYMESMKPNKYGVIYSTPGLSHGIQMEPVDLTVNKRSSPPSAGNSPSS

SEQ ID NO: 19667 - protein, 70 aa, Synthetic construct
LMFDPVPVKQEAMDPVSVSYPSNYMESMKPNKYGVIYSTPLPEKFIQMEPVDLTVNKRSSPPSAGNSPSS

SEQ ID NO: 19668 - protein, 70 aa, Synthetic construct
LMFDPVPVKQEAMDPVSVSYPSNYMESMKPNKYGVIYSTPLPEKFFQTPEVDLTVNKRSSPPSAGNSPSS

SEQ ID NO: 19669 - protein, 70 aa, Synthetic construct
LMFDPVPVKQEAMDPVSVSYPSNYMESMKPNKYGVIYSTPLPEKFFQTPEGLSHGNKRSSPPSAGNSPSS

SEQ ID NO: 19670 - protein, 70 aa, Synthetic construct
LMFDPVPVKQEAMDPVSVSYPSNYMESMKPNKYGVIYSTPLPEKFFQTPEGLSHGIQMEPPPSAGNSPSS

SEQ ID NO: 19671 - protein, 70 aa, Synthetic construct
LMFDPVPVKQEAMDPVSVSYPSNYMESMKPNKYGVIYSTPLPEKFFQTPEGLSHGIQMEPVDLTVNSPSS

SEQ ID NO: 19672 - protein, 70 aa, Synthetic construct
LMFDPVPVKQEAMDPVSVSYPSNYMESMKPNKYGVIYSTPLPEKFFQTPEGLSHGIQMEPVDLTVNKRSS

SEQ ID NO: 19673 - protein, 70 aa, Synthetic construct
VPVIESYEKPISQKKIKIEPGIEPQRTDYYPEEMSPPLMNSVSPPQALLQENHPSVIVQPGKRPLPVESP

SEQ ID NO: 19674 - protein, 70 aa, Synthetic construct
EMENSSYEKPISQKKIKIEPGIEPQRTDYYPEEMSPPLMNSVSPPQALLQENHPSVIVQPGKRPLPVESP

SEQ ID NO: 19675 - protein, 70 aa, Synthetic construct
EMENSSSSMQISQKKIKIEPGIEPQRTDYYPEEMSPPLMNSVSPPQALLQENHPSVIVQPGKRPLPVESP

SEQ ID NO: 19676 - protein, 70 aa, Synthetic construct
EMENSSSSMQVPVIEIKIEPGIEPQRTDYYPEEMSPPLMNSVSPPQALLQENHPSVIVQPGKRPLPVESP

SEQ ID NO: 19677 - protein, 70 aa, Synthetic construct
EMENSSSSMQVPVIESYEKPISQKKIKIEPPEEMSPPLMNSVSPPQALLQENHPSVIVQPGKRPLPVESP

SEQ ID NO: 19678 - protein, 70 aa, Synthetic construct
EMENSSSSMQVPVIESYEKPISQKKIKIEPGIEPQPPLMNSVSPPQALLQENHPSVIVQPGKRPLPVESP

SEQ ID NO: 19679 - protein, 70 aa, Synthetic construct
EMENSSSSMQVPVIESYEKPISQKKIKIEPGIEPQRTDYYSVSPPQALLQENHPSVIVQPGKRPLPVESP

SEQ ID NO: 19680 - protein, 70 aa, Synthetic construct
EMENSSSSMQVPVIESYEKPISQKKIKIEPGIEPQRTDYYPEEMSQALLQENHPSVIVQPGKRPLPVESP

SEQ ID NO: 19681 - protein, 70 aa, Synthetic construct
EMENSSSSMQVPVIESYEKPISQKKIKIEPGIEPQRTDYYPEEMSPPLMNENHPSVIVQPGKRPLPVESP

SEQ ID NO: 19682 - protein, 70 aa, Synthetic construct
EMENSSSSMQVPVIESYEKPISQKKIKIEPGIEPQRTDYYPEEMSPPLMNSVSPPVIVQPGKRPLPVESP

SEQ ID NO: 19683 - protein, 70 aa, Synthetic construct
EMENSSSSMQVPVIESYEKPISQKKIKIEPGIEPQRTDYYPEEMSPPLMNSVSPPQALLQGKRPLPVESP

SEQ ID NO: 19684 - protein, 70 aa, Synthetic construct
EMENSSSSMQVPVIESYEKPISQKKIKIEPGIEPQRTDYYPEEMSPPLMNSVSPPQALLQENHPSPVESP

SEQ ID NO: 19685 - protein, 70 aa, Synthetic construct
EMENSSSSMQVPVIESYEKPISQKKIKIEPGIEPQRTDYYPEEMSPPLMNSVSPPQALLQENHPSVIVQP

SEQ ID NO: 19686 - protein, 70 aa, Synthetic construct
EASPLSWTPVPPGPWVPGHWVVCRLLYQEPAVSLPPFPGFDPGTSLQLPTHGPFTTCPGSHPVLTAPLSG

SEQ ID NO: 19687 - protein, 70 aa, Synthetic construct
EASPLSWTPVPPGPWVPGHWLPPGFLYQEPAVSLPPFPGFDPGTSLQLPTHGPFTTCPGSHPVLTAPLSG

SEQ ID NO: 19688 - protein, 70 aa, Synthetic construct
EASPLSWTPVPPGPWVPGHWLPPGFSMPPPVVCRLPFPGFDPGTSLQLPTHGPFTTCPGSHPVLTAPLSG

SEQ ID NO: 19689 - protein, 70 aa, Synthetic construct
EASPLSWTPVPPGPWVPGHWLPPGFSMPPPVVCRLLYQEPAVSLPLQLPTHGPFTTCPGSHPVLTAPLSG

SEQ ID NO: 19690 - protein, 70 aa, Synthetic construct
EASPLSWTPVPPGPWVPGHWLPPGFSMPPPVVCRLLYQEPAVSLPPFPGFHGPFTTCPGSHPVLTAPLSG

SEQ ID NO: 19691 - protein, 70 aa, Synthetic construct
EASPLSWTPVPPGPWVPGHWLPPGFSMPPPVVCRLLYQEPAVSLPPFPGFDPGTSTCPGSHPVLTAPLSG

SEQ ID NO: 19692 - protein, 70 aa, Synthetic construct
EASPLSWTPVPPGPWVPGHWLPPGFSMPPPVVCRLLYQEPAVSLPPFPGFDPGTSLQLPTHPVLTAPLSG

SEQ ID NO: 19693 - protein, 70 aa, Synthetic construct
EASPLSWTPVPPGPWVPGHWLPPGFSMPPPVVCRLLYQEPAVSLPPFPGFDPGTSLQLPTHGPFTAPLSG

SEQ ID NO: 19694 - protein, 70 aa, Synthetic construct
EASPLSWTPVPPGPWVPGHWLPPGFSMPPPVVCRLLYQEPAVSLPPFPGFDPGTSLQLPTHGPFTTCPGS

SEQ ID NO: 19695 - protein, 70 aa, Synthetic construct
TSGPSEWQLQQEAAEALVGLKDSSQNPAWISLLHPCGPPAPAGGRGFQPVGPCLRPSPAPSVALHIGRLG

SEQ ID NO: 19696 - protein, 70 aa, Synthetic construct
TSGPSEWQLQQEAAEALVGLKDSSQAPRVTPSVPPNPAWIPAGGRGFQPVGPCLRPSPAPSVALHIGRLG

SEQ ID NO: 19697 - protein, 70 aa, Synthetic construct
TSGPSEWQLQQEAAEALVGLKDSSQAPRVTPSVPPNPAWISLLHPGFQPVGPCLRPSPAPSVALHIGRLG

SEQ ID NO: 19698 - protein, 70 aa, Synthetic construct
TSGPSEWQLQQEAAEALVGLKDSSQAPRVTPSVPPNPAWISLLHPCGPPAGPCLRPSPAPSVALHIGRLG

SEQ ID NO: 19699 - protein, 70 aa, Synthetic construct
TSGPSEWQLQQEAAEALVGLKDSSQAPRVTPSVPPNPAWISLLHPCGPPAPAGGRPSPAPSVALHIGRLG

SEQ ID NO: 19700 - protein, 70 aa, Synthetic construct
TSGPSEWQLQQEAAEALVGLKDSSQAPRVTPSVPPNPAWISLLHPCGPPAPAGGRGFQPVSVALHIGRLG

SEQ ID NO: 19701 - protein, 70 aa, Synthetic construct
TSGPSEWQLQQEAAEALVGLKDSSQAPRVTPSVPPNPAWISLLHPCGPPAPAGGRGFQPVGPCLRIGRLG

SEQ ID NO: 19702 - protein, 70 aa, Synthetic construct
TSGPSEWQLQQEAAEALVGLKDSSQAPRVTPSVPPNPAWISLLHPCGPPAPAGGRGFQPVGPCLRPSPAP

SEQ ID NO: 19703 - protein, 70 aa, Synthetic construct
PLNRKGLVSPQSPQKSDCQPNSPTESCSSKNACILQASGSPPAKSPTDPKACNWKKYKFIVLNSLNQNAK

SEQ ID NO: 19704 - protein, 70 aa, Synthetic construct
IALHFGLVSPQSPQKSDCQPNSPTESCSSKNACILQASGSPPAKSPTDPKACNWKKYKFIVLNSLNQNAK

SEQ ID NO: 19705 - protein, 70 aa, Synthetic construct
IALHFEPPNAQSPQKSDCQPNSPTESCSSKNACILQASGSPPAKSPTDPKACNWKKYKFIVLNSLNQNAK

SEQ ID NO: 19706 - protein, 70 aa, Synthetic construct
IALHFEPPNAPLNRKSDCQPNSPTESCSSKNACILQASGSPPAKSPTDPKACNWKKYKFIVLNSLNQNAK

SEQ ID NO: 19707 - protein, 70 aa, Synthetic construct
IALHFEPPNAPLNRKGLVSPNSPTESCSSKNACILQASGSPPAKSPTDPKACNWKKYKFIVLNSLNQNAK

SEQ ID NO: 19708 - protein, 70 aa, Synthetic construct
IALHFEPPNAPLNRKGLVSPQSPQKSCSSKNACILQASGSPPAKSPTDPKACNWKKYKFIVLNSLNQNAK

SEQ ID NO: 19709 - protein, 70 aa, Synthetic construct
IALHFEPPNAPLNRKGLVSPQSPQKSDCQPNACILQASGSPPAKSPTDPKACNWKKYKFIVLNSLNQNAK

SEQ ID NO: 19710 - protein, 70 aa, Synthetic construct
IALHFEPPNAPLNRKGLVSPQSPQKSDCQPNSPTEQASGSPPAKSPTDPKACNWKKYKFIVLNSLNQNAK

SEQ ID NO: 19711 - protein, 70 aa, Synthetic construct
IALHFEPPNAPLNRKGLVSPQSPQKSDCQPNSPTESCSSKPPAKSPTDPKACNWKKYKFIVLNSLNQNAK

SEQ ID NO: 19712 - protein, 70 aa, Synthetic construct
IALHFEPPNAPLNRKGLVSPQSPQKSDCQPNSPTESCSSKNACILQASGSACNWKKYKFIVLNSLNQNAK

SEQ ID NO: 19713 - protein, 70 aa, Synthetic construct
NSPTEQASGSPPAKSPTDPKACNWKKYKFIVLNSLNQNAKPEGPEQAELGRLSPRAYTAPPACQPPMEPE

SEQ ID NO: 19714 - protein, 70 aa, Synthetic construct
NSPTESCSSKPPAKSPTDPKACNWKKYKFIVLNSLNQNAKPEGPEQAELGRLSPRAYTAPPACQPPMEPE

SEQ ID NO: 19715 - protein, 70 aa, Synthetic construct
NSPTESCSSKNACILPTDPKACNWKKYKFIVLNSLNQNAKPEGPEQAELGRLSPRAYTAPPACQPPMEPE

SEQ ID NO: 19716 - protein, 70 aa, Synthetic construct
NSPTESCSSKNACILQASGSACNWKKYKFIVLNSLNQNAKPEGPEQAELGRLSPRAYTAPPACQPPMEPE

SEQ ID NO: 19717 - protein, 70 aa, Synthetic construct
NSPTESCSSKNACILQASGSPPAKSPTDPKACNWKKYKFIVLNSLQAELGRLSPRAYTAPPACQPPMEPE

SEQ ID NO: 19718 - protein, 70 aa, Synthetic construct
NSPTESCSSKNACILQASGSPPAKSPTDPKACNWKKYKFIVLNSLNQNAKRLSPRAYTAPPACQPPMEPE

SEQ ID NO: 19719 - protein, 70 aa, Synthetic construct
NSPTESCSSKNACILQASGSPPAKSPTDPKACNWKKYKFIVLNSLNQNAKPEGPEAYTAPPACQPPMEPE

SEQ ID NO: 19720 - protein, 70 aa, Synthetic construct
GAAGLPKASPFSVESLLSDSPPRRKAASNAAAAAAAGLDFAPGLPCAPRTLIGKGHFLLYPITQPLGFLV

SEQ ID NO: 19721 - protein, 70 aa, Synthetic construct
PGAAVPKASPFSVESLLSDSPPRRKAASNAAAAAAAGLDFAPGLPCAPRTLIGKGHFLLYPITQPLGFLV

SEQ ID NO: 19722 - protein, 70 aa, Synthetic construct
PGAAVAAVERGAAGLPKASPFSVESLLSDSPPRRKAGLDFAPGLPCAPRTLIGKGHFLLYPITQPLGFLV

SEQ ID NO: 19723 - protein, 70 aa, Synthetic construct
PGAAVAAVERGAAGLPKASPFSVESLLSDSPPRRKAASNAAPGLPCAPRTLIGKGHFLLYPITQPLGFLV

SEQ ID NO: 19724 - protein, 70 aa, Synthetic construct
PGAAVAAVERGAAGLPKASPFSVESLLSDSPPRRKAASNAAAAAACAPRTLIGKGHFLLYPITQPLGFLV

SEQ ID NO: 19725 - protein, 70 aa, Synthetic construct
PGAAVAAVERGAAGLPKASPFSVESLLSDSPPRRKAASNAAAAAAAGLDFLIGKGHFLLYPITQPLGFLV

SEQ ID NO: 19726 - protein, 70 aa, Synthetic construct
PGAAVAAVERGAAGLPKASPFSVESLLSDSPPRRKAASNAAAAAAAGLDFAPGLPHFLLYPITQPLGFLV

SEQ ID NO: 19727 - protein, 70 aa, Synthetic construct
HFTYHPVPAIKTEPTDEYDPTLICSPTHGGLGSQPYYPQHPMVAESPSCLVATMAPCQQFRTGLSSPDAR

SEQ ID NO: 19728 - protein, 70 aa, Synthetic construct
NGKRKPVPAIKTEPTDEYDPTLICSPTHGGLGSQPYYPQHPMVAESPSCLVATMAPCQQFRTGLSSPDAR

SEQ ID NO: 19729 - protein, 70 aa, Synthetic construct
NGKRKRSQPQHFTYHPVPAIKTEPTPTHGGLGSQPYYPQHPMVAESPSCLVATMAPCQQFRTGLSSPDAR

SEQ ID NO: 19730 - protein, 70 aa, Synthetic construct
NGKRKRSQPQHFTYHPVPAIKTEPTDEYDPLGSQPYYPQHPMVAESPSCLVATMAPCQQFRTGLSSPDAR

SEQ ID NO: 19731 - protein, 70 aa, Synthetic construct
NGKRKRSQPQHFTYHPVPAIKTEPTDEYDPTLICSYYPQHPMVAESPSCLVATMAPCQQFRTGLSSPDAR

SEQ ID NO: 19732 - protein, 70 aa, Synthetic construct
NGKRKRSQPQHFTYHPVPAIKTEPTDEYDPTLICSPTHGGPMVAESPSCLVATMAPCQQFRTGLSSPDAR

SEQ ID NO: 19733 - protein, 70 aa, Synthetic construct
NGKRKRSQPQHFTYHPVPAIKTEPTDEYDPTLICSPTHGGLGSQPSPSCLVATMAPCQQFRTGLSSPDAR

SEQ ID NO: 19734 - protein, 70 aa, Synthetic construct
NGKRKRSQPQHFTYHPVPAIKTEPTDEYDPTLICSPTHGGLGSQPYYPQHVATMAPCQQFRTGLSSPDAR

SEQ ID NO: 19735 - protein, 70 aa, Synthetic construct
NGKRKRSQPQHFTYHPVPAIKTEPTDEYDPTLICSPTHGGLGSQPYYPQHPMVAEPCQQFRTGLSSPDAR

SEQ ID NO: 19736 - protein, 70 aa, Synthetic construct
NGKRKRSQPQHFTYHPVPAIKTEPTDEYDPTLICSPTHGGLGSQPYYPQHPMVAESPSCLRTGLSSPDAR

SEQ ID NO: 19737 - protein, 70 aa, Synthetic construct
NGKRKRSQPQHFTYHPVPAIKTEPTDEYDPTLICSPTHGGLGSQPYYPQHPMVAESPSCLVATMASPDAR

SEQ ID NO: 19738 - protein, 70 aa, Synthetic construct
NGKRKRSQPQHFTYHPVPAIKTEPTDEYDPTLICSPTHGGLGSQPYYPQHPMVAESPSCLVATMAPCQQF

SEQ ID NO: 19739 - protein, 70 aa, Synthetic construct
PCDHCDRRFYTRKDVRRHLVVHTGRKDFLCQYCAQRFGRKDHLTRHVKKSHSQELLKIKTEPVDMLGLLS

SEQ ID NO: 19740 - protein, 70 aa, Synthetic construct
VAGGADRRFYTRKDVRRHLVVHTGRKDFLCQYCAQRFGRKDHLTRHVKKSHSQELLKIKTEPVDMLGLLS

SEQ ID NO: 19741 - protein, 70 aa, Synthetic construct
VAGGAKEKKHPCDHCRRHLVVHTGRKDFLCQYCAQRFGRKDHLTRHVKKSHSQELLKIKTEPVDMLGLLS

SEQ ID NO: 19742 - protein, 70 aa, Synthetic construct
VAGGAKEKKHPCDHCDRRFYVHTGRKDFLCQYCAQRFGRKDHLTRHVKKSHSQELLKIKTEPVDMLGLLS

SEQ ID NO: 19743 - protein, 70 aa, Synthetic construct
VAGGAKEKKHPCDHCDRRFYTRKDVKDFLCQYCAQRFGRKDHLTRHVKKSHSQELLKIKTEPVDMLGLLS

SEQ ID NO: 19744 - protein, 70 aa, Synthetic construct
VAGGAKEKKHPCDHCDRRFYTRKDVRRHLVQYCAQRFGRKDHLTRHVKKSHSQELLKIKTEPVDMLGLLS

SEQ ID NO: 19745 - protein, 70 aa, Synthetic construct
VAGGAKEKKHPCDHCDRRFYTRKDVRRHLVVHTGRKDFLCQYCAQHVKKSHSQELLKIKTEPVDMLGLLS

SEQ ID NO: 19746 - protein, 70 aa, Synthetic construct
VAGGAKEKKHPCDHCDRRFYTRKDVRRHLVVHTGRKDFLCQYCAQRFGRKHSQELLKIKTEPVDMLGLLS

SEQ ID NO: 19747 - protein, 70 aa, Synthetic construct
VAGGAKEKKHPCDHCDRRFYTRKDVRRHLVVHTGRKDFLCQYCAQRFGRKDHLTRLKIKTEPVDMLGLLS

SEQ ID NO: 19748 - protein, 70 aa, Synthetic construct
VAGGAKEKKHPCDHCDRRFYTRKDVRRHLVVHTGRKDFLCQYCAQRFGRKDHLTRHVKKSHSQELLGLLS

SEQ ID NO: 19749 - protein, 70 aa, Synthetic construct
ALKKMHEEEHHQQMSILQLQLIQMNEVHVAKIQQIERECEMAEEEHRIKMEVLNKKKMYWERKLQTFTKE

SEQ ID NO: 19750 - protein, 70 aa, Synthetic construct
NYRSKHEEEHHQQMSILQLQLIQMNEVHVAKIQQIERECEMAEEEHRIKMEVLNKKKMYWERKLQTFTKE

SEQ ID NO: 19751 - protein, 70 aa, Synthetic construct
NYRSKTSQEGHQQMSILQLQLIQMNEVHVAKIQQIERECEMAEEEHRIKMEVLNKKKMYWERKLQTFTKE

SEQ ID NO: 19752 - protein, 70 aa, Synthetic construct
NYRSKTSQEGALKKMILQLQLIQMNEVHVAKIQQIERECEMAEEEHRIKMEVLNKKKMYWERKLQTFTKE

SEQ ID NO: 19753 - protein, 70 aa, Synthetic construct
NYRSKTSQEGALKKMHEEEHLIQMNEVHVAKIQQIERECEMAEEEHRIKMEVLNKKKMYWERKLQTFTKE

SEQ ID NO: 19754 - protein, 70 aa, Synthetic construct
NYRSKTSQEGALKKMHEEEHHQQMSEVHVAKIQQIERECEMAEEEHRIKMEVLNKKKMYWERKLQTFTKE

SEQ ID NO: 19755 - protein, 70 aa, Synthetic construct
NYRSKTSQEGALKKMHEEEHHQQMSILQLQKIQQIERECEMAEEEHRIKMEVLNKKKMYWERKLQTFTKE

SEQ ID NO: 19756 - protein, 70 aa, Synthetic construct
NYRSKTSQEGALKKMHEEEHHQQMSILQLQLIQMNERECEMAEEEHRIKMEVLNKKKMYWERKLQTFTKE

SEQ ID NO: 19757 - protein, 70 aa, Synthetic construct
NYRSKTSQEGALKKMHEEEHHQQMSILQLQLIQMNEVHVAMAEEEHRIKMEVLNKKKMYWERKLQTFTKE

SEQ ID NO: 19758 - protein, 70 aa, Synthetic construct
NYRSKTSQEGALKKMHEEEHHQQMSILQLQLIQMNEVHVAKIQQIERECEMAEEEHRIKMEVLNKTFTKE

SEQ ID NO: 19759 - protein, 70 aa, Synthetic construct
NYRSKTSQEGALKKMHEEEHHQQMSILQLQLIQMNEVHVAKIQQIERECEMAEEEHRIKMEVLNKKKMYW

SEQ ID NO: 19760 - protein, 70 aa, Synthetic construct
LATIYSPYLLAGSSPECDAPLLSVYGTQDPRHFLPHPGPIPKHLAPSPATYDHYRFFQQYPSNLPIPYGF

SEQ ID NO: 19761 - protein, 70 aa, Synthetic construct
YPPHFSPYLLAGSSPECDAPLLSVYGTQDPRHFLPHPGPIPKHLAPSPATYDHYRFFQQYPSNLPIPYGF

SEQ ID NO: 19762 - protein, 70 aa, Synthetic construct
YPPHFYTEHGAGSSPECDAPLLSVYGTQDPRHFLPHPGPIPKHLAPSPATYDHYRFFQQYPSNLPIPYGF

SEQ ID NO: 19763 - protein, 70 aa, Synthetic construct
YPPHFYTEHGLATIYECDAPLLSVYGTQDPRHFLPHPGPIPKHLAPSPATYDHYRFFQQYPSNLPIPYGF

SEQ ID NO: 19764 - protein, 70 aa, Synthetic construct
YPPHFYTEHGLATIYSPYLLAGSSPGTQDPRHFLPHPGPIPKHLAPSPATYDHYRFFQQYPSNLPIPYGF

SEQ ID NO: 19765 - protein, 70 aa, Synthetic construct
YPPHFYTEHGLATIYSPYLLAGSSPECDAPRHFLPHPGPIPKHLAPSPATYDHYRFFQQYPSNLPIPYGF

SEQ ID NO: 19766 - protein, 70 aa, Synthetic construct
YPPHFYTEHGLATIYSPYLLAGSSPECDAPLLSVYHPGPIPKHLAPSPATYDHYRFFQQYPSNLPIPYGF

SEQ ID NO: 19767 - protein, 70 aa, Synthetic construct
YPPHFYTEHGLATIYSPYLLAGSSPECDAPLLSVYGTQDPPKHLAPSPATYDHYRFFQQYPSNLPIPYGF

SEQ ID NO: 19768 - protein, 70 aa, Synthetic construct
YPPHFYTEHGLATIYSPYLLAGSSPECDAPLLSVYGTQDPRHFLPPSPATYDHYRFFQQYPSNLPIPYGF

SEQ ID NO: 19769 - protein, 70 aa, Synthetic construct
YPPHFYTEHGLATIYSPYLLAGSSPECDAPLLSVYGTQDPRHFLPHPGPIYDHYRFFQQYPSNLPIPYGF

SEQ ID NO: 19770 - protein, 70 aa, Synthetic construct
YPPHFYTEHGLATIYSPYLLAGSSPECDAPLLSVYGTQDPRHFLPHPGPIPKHLAFFQQYPSNLPIPYGF

SEQ ID NO: 19771 - protein, 70 aa, Synthetic construct
YPPHFYTEHGLATIYSPYLLAGSSPECDAPLLSVYGTQDPRHFLPHPGPIPKHLAPSPATPSNLPIPYGF

SEQ ID NO: 19772 - protein, 70 aa, Synthetic construct
YPPHFYTEHGLATIYSPYLLAGSSPECDAPLLSVYGTQDPRHFLPHPGPIPKHLAPSPATYDHYRIPYGF

SEQ ID NO: 19773 - protein, 70 aa, Synthetic construct
YPPHFYTEHGLATIYSPYLLAGSSPECDAPLLSVYGTQDPRHFLPHPGPIPKHLAPSPATYDHYRFFQQY

SEQ ID NO: 19774 - protein, 70 aa, Synthetic construct
DAEAAHMAATAILNLSTRCWEMPENLSTKPQDLPSKSVDIEVDENGTLDLSMHKHRKRENAFPSSSSCSS

SEQ ID NO: 19775 - protein, 70 aa, Synthetic construct
KAFQCFDYSQAILNLSTRCWEMPENLSTKPQDLPSKSVDIEVDENGTLDLSMHKHRKRENAFPSSSSCSS

SEQ ID NO: 19776 - protein, 70 aa, Synthetic construct
KAFQCFDYSQDAEAAHMAATAILNLSTRCWQDLPSKSVDIEVDENGTLDLSMHKHRKRENAFPSSSSCSS

SEQ ID NO: 19777 - protein, 70 aa, Synthetic construct
KAFQCFDYSQDAEAAHMAATAILNLSTRCWEMPENKSVDIEVDENGTLDLSMHKHRKRENAFPSSSSCSS

SEQ ID NO: 19778 - protein, 70 aa, Synthetic construct
KAFQCFDYSQDAEAAHMAATAILNLSTRCWEMPENLSTKPEVDENGTLDLSMHKHRKRENAFPSSSSCSS

SEQ ID NO: 19779 - protein, 70 aa, Synthetic construct
KAFQCFDYSQDAEAAHMAATAILNLSTRCWEMPENLSTKPQDLPSGTLDLSMHKHRKRENAFPSSSSCSS

SEQ ID NO: 19780 - protein, 70 aa, Synthetic construct
KAFQCFDYSQDAEAAHMAATAILNLSTRCWEMPENLSTKPQDLPSKSVDIEVDENRKRENAFPSSSSCSS

SEQ ID NO: 19781 - protein, 70 aa, Synthetic construct
KAFQCFDYSQDAEAAHMAATAILNLSTRCWEMPENLSTKPQDLPSKSVDIEVDENGTLDLAFPSSSSCSS

SEQ ID NO: 19782 - protein, 70 aa, Synthetic construct
KAFQCFDYSQDAEAAHMAATAILNLSTRCWEMPENLSTKPQDLPSKSVDIEVDENGTLDLSMHKHSSCSS

SEQ ID NO: 19783 - protein, 70 aa, Synthetic construct
KAFQCFDYSQDAEAAHMAATAILNLSTRCWEMPENLSTKPQDLPSKSVDIEVDENGTLDLSMHKHRKREN

SEQ ID NO: 19784 - protein, 70 aa, Synthetic construct
RWMSDHLSIKTRIEKQKRKEEEEERQILLAVQKKEQEQMLKEERKRELEEKVKAVEDRAKRRKLREERAW

SEQ ID NO: 19785 - protein, 70 aa, Synthetic construct
RWMSDHLSIKPVKQEQKRKEEEEERQILLAVQKKEQEQMLKEERKRELEEKVKAVEDRAKRRKLREERAW

SEQ ID NO: 19786 - protein, 70 aa, Synthetic construct
RWMSDHLSIKPVKQEETPVLEEEERQILLAVQKKEQEQMLKEERKRELEEKVKAVEDRAKRRKLREERAW

SEQ ID NO: 19787 - protein, 70 aa, Synthetic construct
RWMSDHLSIKPVKQEETPVLTRIEKQILLAVQKKEQEQMLKEERKRELEEKVKAVEDRAKRRKLREERAW

SEQ ID NO: 19788 - protein, 70 aa, Synthetic construct
RWMSDHLSIKPVKQEETPVLTRIEKQKRKEVQKKEQEQMLKEERKRELEEKVKAVEDRAKRRKLREERAW

SEQ ID NO: 19789 - protein, 70 aa, Synthetic construct
RWMSDHLSIKPVKQEETPVLTRIEKQKRKEEEEERQEQMLKEERKRELEEKVKAVEDRAKRRKLREERAW

SEQ ID NO: 19790 - protein, 70 aa, Synthetic construct
RWMSDHLSIKPVKQEETPVLTRIEKQKRKEEEEERQILLAKEERKRELEEKVKAVEDRAKRRKLREERAW

SEQ ID NO: 19791 - protein, 70 aa, Synthetic construct
RWMSDHLSIKPVKQEETPVLTRIEKQKRKEEEEERQILLAVQKKERELEEKVKAVEDRAKRRKLREERAW

SEQ ID NO: 19792 - protein, 70 aa, Synthetic construct
RWMSDHLSIKPVKQEETPVLTRIEKQKRKEEEEERQILLAVQKKEQEQMLKVKAVEDRAKRRKLREERAW

SEQ ID NO: 19793 - protein, 70 aa, Synthetic construct
RWMSDHLSIKPVKQEETPVLTRIEKQKRKEEEEERQILLAVQKKEQEQMLKEERKEDRAKRRKLREERAW

SEQ ID NO: 19794 - protein, 70 aa, Synthetic construct
RWMSDHLSIKPVKQEETPVLTRIEKQKRKEEEEERQILLAVQKKEQEQMLKEERKRELEERRKLREERAW

SEQ ID NO: 19795 - protein, 70 aa, Synthetic construct
SPLATPSLIPQAALELKQAFREALQAVEATQGQQQQLRGMVPIVLVAKLGPQVMAAARVPPRLQPEELGL

SEQ ID NO: 19796 - protein, 70 aa, Synthetic construct
MDFSPPSLIPQAALELKQAFREALQAVEATQGQQQQLRGMVPIVLVAKLGPQVMAAARVPPRLQPEELGL

SEQ ID NO: 19797 - protein, 70 aa, Synthetic construct
MDFSPENGVFQAALELKQAFREALQAVEATQGQQQQLRGMVPIVLVAKLGPQVMAAARVPPRLQPEELGL

SEQ ID NO: 19798 - protein, 70 aa, Synthetic construct
MDFSPENGVFSPLATLKQAFREALQAVEATQGQQQQLRGMVPIVLVAKLGPQVMAAARVPPRLQPEELGL

SEQ ID NO: 19799 - protein, 70 aa, Synthetic construct
MDFSPENGVFSPLATPSLIPREALQAVEATQGQQQQLRGMVPIVLVAKLGPQVMAAARVPPRLQPEELGL

SEQ ID NO: 19800 - protein, 70 aa, Synthetic construct
MDFSPENGVFSPLATPSLIPQAALEAVEATQGQQQQLRGMVPIVLVAKLGPQVMAAARVPPRLQPEELGL

SEQ ID NO: 19801 - protein, 70 aa, Synthetic construct
MDFSPENGVFSPLATPSLIPQAALELKQAFREALQAVEATQGQQQQLRGMVPIVLAARVPPRLQPEELGL

SEQ ID NO: 19802 - protein, 70 aa, Synthetic construct
MDFSPENGVFSPLATPSLIPQAALELKQAFREALQAVEATQGQQQQLRGMVPIVLVAKLGPRLQPEELGL

SEQ ID NO: 19803 - protein, 70 aa, Synthetic construct
MDFSPENGVFSPLATPSLIPQAALELKQAFREALQAVEATQGQQQQLRGMVPIVLVAKLGPQVMAEELGL

SEQ ID NO: 19804 - protein, 70 aa, Synthetic construct
MDFSPENGVFSPLATPSLIPQAALELKQAFREALQAVEATQGQQQQLRGMVPIVLVAKLGPQVMAAARVP

SEQ ID NO: 19805 - protein, 70 aa, Synthetic construct
VPSLVPRPPQTSLVKFVGNIYTLKCRFCEVEFQGPLSIQEEWVRHLQRHILEMNFSKADPPPEESQAPQA

SEQ ID NO: 19806 - protein, 70 aa, Synthetic construct
VRQPPPRPPQTSLVKFVGNIYTLKCRFCEVEFQGPLSIQEEWVRHLQRHILEMNFSKADPPPEESQAPQA

SEQ ID NO: 19807 - protein, 70 aa, Synthetic construct
VRQPPPRVRPTSLVKFVGNIYTLKCRFCEVEFQGPLSIQEEWVRHLQRHILEMNFSKADPPPEESQAPQA

SEQ ID NO: 19808 - protein, 70 aa, Synthetic construct
VRQPPPRVRPVPSLVFVGNIYTLKCRFCEVEFQGPLSIQEEWVRHLQRHILEMNFSKADPPPEESQAPQA

SEQ ID NO: 19809 - protein, 70 aa, Synthetic construct
VRQPPPRVRPVPSLVPRPPQTSLVKFVGNIYTLKCRFCEVEFQGPLSIQEEWVRHLQRHIPPEESQAPQA

SEQ ID NO: 19810 - protein, 70 aa, Synthetic construct
VRQPPPRVRPVPSLVPRPPQTSLVKFVGNIYTLKCRFCEVEFQGPLSIQEEWVRHLQRHILEMNFQAPQA

SEQ ID NO: 19811 - protein, 70 aa, Synthetic construct
VRQPPPRVRPVPSLVPRPPQTSLVKFVGNIYTLKCRFCEVEFQGPLSIQEEWVRHLQRHILEMNFSKADP

SEQ ID NO: 19812 - protein, 70 aa, Synthetic construct
SDITFPVSEELEADLASGDQSLPMGVLGAQSERFPSNLEVEASPQASSAEVNASPLWNLAHVKMEPQESE

SEQ ID NO: 19813 - protein, 70 aa, Synthetic construct
KPVKIPVSEELEADLASGDQSLPMGVLGAQSERFPSNLEVEASPQASSAEVNASPLWNLAHVKMEPQESE

SEQ ID NO: 19814 - protein, 70 aa, Synthetic construct
KPVKIKEEPVLEADLASGDQSLPMGVLGAQSERFPSNLEVEASPQASSAEVNASPLWNLAHVKMEPQESE

SEQ ID NO: 19815 - protein, 70 aa, Synthetic construct
KPVKIKEEPVSDITFASGDQSLPMGVLGAQSERFPSNLEVEASPQASSAEVNASPLWNLAHVKMEPQESE

SEQ ID NO: 19816 - protein, 70 aa, Synthetic construct
KPVKIKEEPVSDITFPVSEESLPMGVLGAQSERFPSNLEVEASPQASSAEVNASPLWNLAHVKMEPQESE

SEQ ID NO: 19817 - protein, 70 aa, Synthetic construct
KPVKIKEEPVSDITFPVSEELEADLVLGAQSERFPSNLEVEASPQASSAEVNASPLWNLAHVKMEPQESE

SEQ ID NO: 19818 - protein, 70 aa, Synthetic construct
KPVKIKEEPVSDITFPVSEELEADLASGDQSERFPSNLEVEASPQASSAEVNASPLWNLAHVKMEPQESE

SEQ ID NO: 19819 - protein, 70 aa, Synthetic construct
KPVKIKEEPVSDITFPVSEELEADLASGDQSLPMGSNLEVEASPQASSAEVNASPLWNLAHVKMEPQESE

SEQ ID NO: 19820 - protein, 70 aa, Synthetic construct
KPVKIKEEPVSDITFPVSEELEADLASGDQSLPMGVLGAQEASPQASSAEVNASPLWNLAHVKMEPQESE

SEQ ID NO: 19821 - protein, 70 aa, Synthetic construct
KPVKIKEEPVSDITFPVSEELEADLASGDQSLPMGVLGAQSERFPASSAEVNASPLWNLAHVKMEPQESE

SEQ ID NO: 19822 - protein, 70 aa, Synthetic construct
KPVKIKEEPVSDITFPVSEELEADLASGDQSLPMGVLGAQSERFPSNLEVVNASPLWNLAHVKMEPQESE

SEQ ID NO: 19823 - protein, 70 aa, Synthetic construct
KPVKIKEEPVSDITFPVSEELEADLASGDQSLPMGVLGAQSERFPSNLEVEASPQLWNLAHVKMEPQESE

SEQ ID NO: 19824 - protein, 70 aa, Synthetic construct
KPVKIKEEPVSDITFPVSEELEADLASGDQSLPMGVLGAQSERFPSNLEVEASPQASSAEHVKMEPQESE

SEQ ID NO: 19825 - protein, 70 aa, Synthetic construct
KPVKIKEEPVSDITFPVSEELEADLASGDQSLPMGVLGAQSERFPSNLEVEASPQASSAEVNASPPQESE

SEQ ID NO: 19826 - protein, 70 aa, Synthetic construct
KPVKIKEEPVSDITFPVSEELEADLASGDQSLPMGVLGAQSERFPSNLEVEASPQASSAEVNASPLWNLA

SEQ ID NO: 19827 - protein, 70 aa, Synthetic construct
DMQKVRICSEGGWVPALFDEVAIYFSDEEWEVLTEQQKALYREVMRMNYETVLSLEFPFPKPDMITRLEG

SEQ ID NO: 19828 - protein, 70 aa, Synthetic construct
QSRELRICSEGGWVPALFDEVAIYFSDEEWEVLTEQQKALYREVMRMNYETVLSLEFPFPKPDMITRLEG

SEQ ID NO: 19829 - protein, 70 aa, Synthetic construct
QSRELEDGPAGGWVPALFDEVAIYFSDEEWEVLTEQQKALYREVMRMNYETVLSLEFPFPKPDMITRLEG

SEQ ID NO: 19830 - protein, 70 aa, Synthetic construct
QSRELEDGPADMQKVALFDEVAIYFSDEEWEVLTEQQKALYREVMRMNYETVLSLEFPFPKPDMITRLEG

SEQ ID NO: 19831 - protein, 70 aa, Synthetic construct
QSRELEDGPADMQKVRICSEVAIYFSDEEWEVLTEQQKALYREVMRMNYETVLSLEFPFPKPDMITRLEG

SEQ ID NO: 19832 - protein, 70 aa, Synthetic construct
QSRELEDGPADMQKVRICSEGGWVPALFDEVAIYFSDEEWEVLTEQQKALYREVMEFPFPKPDMITRLEG

SEQ ID NO: 19833 - protein, 70 aa, Synthetic construct
QSRELEDGPADMQKVRICSEGGWVPALFDEVAIYFSDEEWEVLTEQQKALYREVMRMNYEKPDMITRLEG

SEQ ID NO: 19834 - protein, 70 aa, Synthetic construct
QSRELEDGPADMQKVRICSEGGWVPALFDEVAIYFSDEEWEVLTEQQKALYREVMRMNYETVLSLTRLEG

SEQ ID NO: 19835 - protein, 70 aa, Synthetic construct
QSRELEDGPADMQKVRICSEGGWVPALFDEVAIYFSDEEWEVLTEQQKALYREVMRMNYETVLSLEFPFP

SEQ ID NO: 19836 - protein, 70 aa, Synthetic construct
AEWLARYWEMREQRTPTLKGKLVQKADQEQQDPLEYLQSDEEDDEKRGAQRRLQEQRERLHGALALIELA

SEQ ID NO: 19837 - protein, 70 aa, Synthetic construct
KHQAARYWEMREQRTPTLKGKLVQKADQEQQDPLEYLQSDEEDDEKRGAQRRLQEQRERLHGALALIELA

SEQ ID NO: 19838 - protein, 70 aa, Synthetic construct
KHQAADNKAAREQRTPTLKGKLVQKADQEQQDPLEYLQSDEEDDEKRGAQRRLQEQRERLHGALALIELA

SEQ ID NO: 19839 - protein, 70 aa, Synthetic construct
KHQAADNKAAAEWLAPTLKGKLVQKADQEQQDPLEYLQSDEEDDEKRGAQRRLQEQRERLHGALALIELA

SEQ ID NO: 19840 - protein, 70 aa, Synthetic construct
KHQAADNKAAAEWLARYWEMKLVQKADQEQQDPLEYLQSDEEDDEKRGAQRRLQEQRERLHGALALIELA

SEQ ID NO: 19841 - protein, 70 aa, Synthetic construct
KHQAADNKAAAEWLARYWEMREQRTADQEQQDPLEYLQSDEEDDEKRGAQRRLQEQRERLHGALALIELA

SEQ ID NO: 19842 - protein, 70 aa, Synthetic construct
KHQAADNKAAAEWLARYWEMREQRTPTLKGQDPLEYLQSDEEDDEKRGAQRRLQEQRERLHGALALIELA

SEQ ID NO: 19843 - protein, 70 aa, Synthetic construct
KHQAADNKAAAEWLARYWEMREQRTPTLKGKLVQKYLQSDEEDDEKRGAQRRLQEQRERLHGALALIELA

SEQ ID NO: 19844 - protein, 70 aa, Synthetic construct
KHQAADNKAAAEWLARYWEMREQRTPTLKGKLVQKADQEQEEDDEKRGAQRRLQEQRERLHGALALIELA

SEQ ID NO: 19845 - protein, 70 aa, Synthetic construct
KHQAADNKAAAEWLARYWEMREQRTPTLKGKLVQKADQEQQDPLEKRGAQRRLQEQRERLHGALALIELA

SEQ ID NO: 19846 - protein, 70 aa, Synthetic construct
KHQAADNKAAAEWLARYWEMREQRTPTLKGKLVQKADQEQQDPLEYLQSDRRLQEQRERLHGALALIELA

SEQ ID NO: 19847 - protein, 70 aa, Synthetic construct
KHQAADNKAAAEWLARYWEMREQRTPTLKGKLVQKADQEQQDPLEYLQSDEEDDEQRERLHGALALIELA

SEQ ID NO: 19848 - protein, 70 aa, Synthetic construct
FSRAVQTHSSKFFEEDGSLKEVHKINEMYASLQEELKSICKKVEDSEQAVDKLVKDVNRLKREIEKRRGA

SEQ ID NO: 19849 - protein, 70 aa, Synthetic construct
TVSGSCMSTGFSRAVQTHSSEVHKINEMYASLQEELKSICKKVEDSEQAVDKLVKDVNRLKREIEKRRGA

SEQ ID NO: 19850 - protein, 70 aa, Synthetic construct
TVSGSCMSTGFSRAVQTHSSKFFEENEMYASLQEELKSICKKVEDSEQAVDKLVKDVNRLKREIEKRRGA

SEQ ID NO: 19851 - protein, 70 aa, Synthetic construct
TVSGSCMSTGFSRAVQTHSSKFFEEDGSLKSLQEELKSICKKVEDSEQAVDKLVKDVNRLKREIEKRRGA

SEQ ID NO: 19852 - protein, 70 aa, Synthetic construct
TVSGSCMSTGFSRAVQTHSSKFFEEDGSLKEVHKILKSICKKVEDSEQAVDKLVKDVNRLKREIEKRRGA

SEQ ID NO: 19853 - protein, 70 aa, Synthetic construct
TVSGSCMSTGFSRAVQTHSSKFFEEDGSLKEVHKINEMYASLQEELKSICDKLVKDVNRLKREIEKRRGA

SEQ ID NO: 19854 - protein, 70 aa, Synthetic construct
TVSGSCMSTGFSRAVQTHSSKFFEEDGSLKEVHKINEMYASLQEELKSICKKVEDDVNRLKREIEKRRGA

SEQ ID NO: 19855 - protein, 70 aa, Synthetic construct
PLKRKQRRSRTTFTAEQLEELEKAFERTHYQRTKLTEARVQVWFSNRRARWRKQAGANQLAAFNHLLPGG

SEQ ID NO: 19856 - protein, 70 aa, Synthetic construct
PLKRKQRRSRTTFTAEQLEELEKAFERTHYPDIYTREELAQRTKLTEARVQVWFSNRRARWRKQAGANQL

SEQ ID NO: 19857 - protein, 70 aa, Synthetic construct
RASNGIENDEEIKQLDEEIKADMIKLRTQITTMESNLKTIEEENKVIEQQNESLLHELANLSQSLIHSLA

SEQ ID NO: 19858 - protein, 70 aa, Synthetic construct
RASNGIENDEEIKQLDEEIKELNESLRTQITTMESNLKTIEEENKVIEQQNESLLHELANLSQSLIHSLA

SEQ ID NO: 19859 - protein, 70 aa, Synthetic construct
LSKSLIPSITCPFCTFKTFYPEVLMMHQRLEHKYNPDVHKNCRNKSLLRSRRTGCPPALLGKDVPPLSSF

SEQ ID NO: 19860 - protein, 70 aa, Synthetic construct
GALHNIPSITCPFCTFKTFYPEVLMMHQRLEHKYNPDVHKNCRNKSLLRSRRTGCPPALLGKDVPPLSSF

SEQ ID NO: 19861 - protein, 70 aa, Synthetic construct
GALHNCPAISCPFCTFKTFYPEVLMMHQRLEHKYNPDVHKNCRNKSLLRSRRTGCPPALLGKDVPPLSSF

SEQ ID NO: 19862 - protein, 70 aa, Synthetic construct
GALHNCPAISLSKSLFKTFYPEVLMMHQRLEHKYNPDVHKNCRNKSLLRSRRTGCPPALLGKDVPPLSSF

SEQ ID NO: 19863 - protein, 70 aa, Synthetic construct
GALHNCPAISLSKSLIPSITPEVLMMHQRLEHKYNPDVHKNCRNKSLLRSRRTGCPPALLGKDVPPLSSF

SEQ ID NO: 19864 - protein, 70 aa, Synthetic construct
GALHNCPAISLSKSLIPSITCPFCTMHQRLEHKYNPDVHKNCRNKSLLRSRRTGCPPALLGKDVPPLSSF

SEQ ID NO: 19865 - protein, 70 aa, Synthetic construct
GALHNCPAISLSKSLIPSITCPFCTFKTFYEHKYNPDVHKNCRNKSLLRSRRTGCPPALLGKDVPPLSSF

SEQ ID NO: 19866 - protein, 70 aa, Synthetic construct
GALHNCPAISLSKSLIPSITCPFCTFKTFYPEVLMPDVHKNCRNKSLLRSRRTGCPPALLGKDVPPLSSF

SEQ ID NO: 19867 - protein, 70 aa, Synthetic construct
GALHNCPAISLSKSLIPSITCPFCTFKTFYPEVLMMHQRLNCRNKSLLRSRRTGCPPALLGKDVPPLSSF

SEQ ID NO: 19868 - protein, 70 aa, Synthetic construct
GALHNCPAISLSKSLIPSITCPFCTFKTFYPEVLMMHQRLEHKYNSLLRSRRTGCPPALLGKDVPPLSSF

SEQ ID NO: 19869 - protein, 70 aa, Synthetic construct
GALHNCPAISLSKSLIPSITCPFCTFKTFYPEVLMMHQRLEHKYNPDVHKRRTGCPPALLGKDVPPLSSF

SEQ ID NO: 19870 - protein, 70 aa, Synthetic construct
AETNSQQPGPDVPVLEMKTETQAEDTEPDPGESKGEPRSEMMEEDLQGASQVKEETDIAEQKSEPMEVDE

SEQ ID NO: 19871 - protein, 70 aa, Synthetic construct
RVPTPQQPGPDVPVLEMKTETQAEDTEPDPGESKGEPRSEMMEEDLQGASQVKEETDIAEQKSEPMEVDE

SEQ ID NO: 19872 - protein, 70 aa, Synthetic construct
RVPTPSSVASDVPVLEMKTETQAEDTEPDPGESKGEPRSEMMEEDLQGASQVKEETDIAEQKSEPMEVDE

SEQ ID NO: 19873 - protein, 70 aa, Synthetic construct
RVPTPSSVASAETNSEMKTETQAEDTEPDPGESKGEPRSEMMEEDLQGASQVKEETDIAEQKSEPMEVDE

SEQ ID NO: 19874 - protein, 70 aa, Synthetic construct
RVPTPSSVASAETNSQQPGPDVPVLEMKTEGESKGEPRSEMMEEDLQGASQVKEETDIAEQKSEPMEVDE

SEQ ID NO: 19875 - protein, 70 aa, Synthetic construct
RVPTPSSVASAETNSQQPGPDVPVLEMKTETQAEDEPRSEMMEEDLQGASQVKEETDIAEQKSEPMEVDE

SEQ ID NO: 19876 - protein, 70 aa, Synthetic construct
RVPTPSSVASAETNSQQPGPDVPVLEMKTETQAEDTEPDPMMEEDLQGASQVKEETDIAEQKSEPMEVDE

SEQ ID NO: 19877 - protein, 70 aa, Synthetic construct
RVPTPSSVASAETNSQQPGPDVPVLEMKTETQAEDTEPDPGESKGLQGASQVKEETDIAEQKSEPMEVDE

SEQ ID NO: 19878 - protein, 70 aa, Synthetic construct
RVPTPSSVASAETNSQQPGPDVPVLEMKTETQAEDTEPDPGESKGEPRSEQVKEETDIAEQKSEPMEVDE

SEQ ID NO: 19879 - protein, 70 aa, Synthetic construct
RVPTPSSVASAETNSQQPGPDVPVLEMKTETQAEDTEPDPGESKGEPRSEMMEEDLQGASQVKEEMEVDE

SEQ ID NO: 19880 - protein, 70 aa, Synthetic construct
RVPTPSSVASAETNSQQPGPDVPVLEMKTETQAEDTEPDPGESKGEPRSEMMEEDLQGASQVKEETDIAE

SEQ ID NO: 19881 - protein, 70 aa, Synthetic construct
KKPEVKVEVKEEEESSSNGTASQSTSPSQPRKKIFKPEELRQALMPTLEALYRQDPESLPFRQPVDPQLL

SEQ ID NO: 19882 - protein, 70 aa, Synthetic construct
QKSEPKVEVKEEEESSSNGTASQSTSPSQPRKKIFKPEELRQALMPTLEALYRQDPESLPFRQPVDPQLL

SEQ ID NO: 19883 - protein, 70 aa, Synthetic construct
QKSEPMEVDEKKPEVSSNGTASQSTSPSQPRKKIFKPEELRQALMPTLEALYRQDPESLPFRQPVDPQLL

SEQ ID NO: 19884 - protein, 70 aa, Synthetic construct
QKSEPMEVDEKKPEVKVEVKASQSTSPSQPRKKIFKPEELRQALMPTLEALYRQDPESLPFRQPVDPQLL

SEQ ID NO: 19885 - protein, 70 aa, Synthetic construct
QKSEPMEVDEKKPEVKVEVKEEEESSPSQPRKKIFKPEELRQALMPTLEALYRQDPESLPFRQPVDPQLL

SEQ ID NO: 19886 - protein, 70 aa, Synthetic construct
QKSEPMEVDEKKPEVKVEVKEEEESSSNGTRKKIFKPEELRQALMPTLEALYRQDPESLPFRQPVDPQLL

SEQ ID NO: 19887 - protein, 70 aa, Synthetic construct
QKSEPMEVDEKKPEVKVEVKEEEESSSNGTASQSTKPEELRQALMPTLEALYRQDPESLPFRQPVDPQLL

SEQ ID NO: 19888 - protein, 70 aa, Synthetic construct
QKSEPMEVDEKKPEVKVEVKEEEESSSNGTASQSTSPSQPRQALMPTLEALYRQDPESLPFRQPVDPQLL

SEQ ID NO: 19889 - protein, 70 aa, Synthetic construct
QKSEPMEVDEKKPEVKVEVKEEEESSSNGTASQSTSPSQPRKKIFPTLEALYRQDPESLPFRQPVDPQLL

SEQ ID NO: 19890 - protein, 70 aa, Synthetic construct
QKSEPMEVDEKKPEVKVEVKEEEESSSNGTASQSTSPSQPRKKIFKPEELLYRQDPESLPFRQPVDPQLL

SEQ ID NO: 19891 - protein, 70 aa, Synthetic construct
QKSEPMEVDEKKPEVKVEVKEEEESSSNGTASQSTSPSQPRKKIFKPEELRQALMPESLPFRQPVDPQLL

SEQ ID NO: 19892 - protein, 70 aa, Synthetic construct
QKSEPMEVDEKKPEVKVEVKEEEESSSNGTASQSTSPSQPRKKIFKPEELRQALMPTLEAFRQPVDPQLL

SEQ ID NO: 19893 - protein, 70 aa, Synthetic construct
QKSEPMEVDEKKPEVKVEVKEEEESSSNGTASQSTSPSQPRKKIFKPEELRQALMPTLEALYRQDDPQLL

SEQ ID NO: 19894 - protein, 70 aa, Synthetic construct
QKSEPMEVDEKKPEVKVEVKEEEESSSNGTASQSTSPSQPRKKIFKPEELRQALMPTLEALYRQDPESLP

SEQ ID NO: 19895 - protein, 70 aa, Synthetic construct
IWPSGFVCDNCLKKTAKRLQTTRLGNHLEDRVNKFLRRQNHPEAGEVFVRVVASSDKTVEVKPGMKSRFV

SEQ ID NO: 19896 - protein, 70 aa, Synthetic construct
IWPSGFVCDNCLKKTGRPRKTTRLGNHLEDRVNKFLRRQNHPEAGEVFVRVVASSDKTVEVKPGMKSRFV

SEQ ID NO: 19897 - protein, 70 aa, Synthetic construct
IWPSGFVCDNCLKKTGRPRKENKFSNHLEDRVNKFLRRQNHPEAGEVFVRVVASSDKTVEVKPGMKSRFV

SEQ ID NO: 19898 - protein, 70 aa, Synthetic construct
IWPSGFVCDNCLKKTGRPRKENKFSAKRLQRVNKFLRRQNHPEAGEVFVRVVASSDKTVEVKPGMKSRFV

SEQ ID NO: 19899 - protein, 70 aa, Synthetic construct
IWPSGFVCDNCLKKTGRPRKENKFSAKRLQTTRLGLRRQNHPEAGEVFVRVVASSDKTVEVKPGMKSRFV

SEQ ID NO: 19900 - protein, 70 aa, Synthetic construct
IWPSGFVCDNCLKKTGRPRKENKFSAKRLQTTRLGNHLEDHPEAGEVFVRVVASSDKTVEVKPGMKSRFV

SEQ ID NO: 19901 - protein, 70 aa, Synthetic construct
IWPSGFVCDNCLKKTGRPRKENKFSAKRLQTTRLGNHLEDRVNKFEVFVRVVASSDKTVEVKPGMKSRFV

SEQ ID NO: 19902 - protein, 70 aa, Synthetic construct
IWPSGFVCDNCLKKTGRPRKENKFSAKRLQTTRLGNHLEDRVNKFLRRQNVVASSDKTVEVKPGMKSRFV

SEQ ID NO: 19903 - protein, 70 aa, Synthetic construct
IWPSGFVCDNCLKKTGRPRKENKFSAKRLQTTRLGNHLEDRVNKFLRRQNHPEAGDKTVEVKPGMKSRFV

SEQ ID NO: 19904 - protein, 70 aa, Synthetic construct
IWPSGFVCDNCLKKTGRPRKENKFSAKRLQTTRLGNHLEDRVNKFLRRQNHPEAGEVFVRVKPGMKSRFV

SEQ ID NO: 19905 - protein, 70 aa, Synthetic construct
IWPSGFVCDNCLKKTGRPRKENKFSAKRLQTTRLGNHLEDRVNKFLRRQNHPEAGEVFVRVVASSKSRFV

SEQ ID NO: 19906 - protein, 70 aa, Synthetic construct
IWPSGFVCDNCLKKTGRPRKENKFSAKRLQTTRLGNHLEDRVNKFLRRQNHPEAGEVFVRVVASSDKTVE

SEQ ID NO: 19907 - protein, 70 aa, Synthetic construct
KHHVETRWHCTVCEDYDLCINCYNTKSHAHKMVKWQGEPQSKSPQESRRLSIQRCIQSLVHACQCRNANC

SEQ ID NO: 19908 - protein, 70 aa, Synthetic construct
KHHVETRWHCTVCEDYDLCINCYNTKSHAHKMVKWGLGLDSKSPQESRRLSIQRCIQSLVHACQCRNANC

SEQ ID NO: 19909 - protein, 70 aa, Synthetic construct
KHHVETRWHCTVCEDYDLCINCYNTKSHAHKMVKWGLGLDDEGSSESRRLSIQRCIQSLVHACQCRNANC

SEQ ID NO: 19910 - protein, 70 aa, Synthetic construct
KHHVETRWHCTVCEDYDLCINCYNTKSHAHKMVKWGLGLDDEGSSQGEPQSIQRCIQSLVHACQCRNANC

SEQ ID NO: 19911 - protein, 70 aa, Synthetic construct
KHHVETRWHCTVCEDYDLCINCYNTKSHAHKMVKWGLGLDDEGSSQGEPQSKSPQIQSLVHACQCRNANC

SEQ ID NO: 19912 - protein, 70 aa, Synthetic construct
KHHVETRWHCTVCEDYDLCINCYNTKSHAHKMVKWGLGLDDEGSSQGEPQSKSPQESRRLHACQCRNANC

SEQ ID NO: 19913 - protein, 70 aa, Synthetic construct
KHHVETRWHCTVCEDYDLCINCYNTKSHAHKMVKWGLGLDDEGSSQGEPQSKSPQESRRLSIQRCRNANC

SEQ ID NO: 19914 - protein, 70 aa, Synthetic construct
KHHVETRWHCTVCEDYDLCINCYNTKSHAHKMVKWGLGLDDEGSSQGEPQSKSPQESRRLSIQRCIQSLV

SEQ ID NO: 19915 - protein, 70 aa, Synthetic construct
LRNNIERVEKELKKKVEYKREEINSEFEQIRLFLQNEQEMILRQIQDEEMNILAKLNENLVELSDYVSTL

SEQ ID NO: 19916 - protein, 70 aa, Synthetic construct
SEDRKAVRYERKKRNICYDPRRFYVCPAVLGSQRFSSGRHYWEVEVGNKPKWILGVCQDCLLRNWQDQPS

SEQ ID NO: 19917 - protein, 70 aa, Synthetic construct
LNTAHAVRYERKKRNICYDPRRFYVCPAVLGSQRFSSGRHYWEVEVGNKPKWILGVCQDCLLRNWQDQPS

SEQ ID NO: 19918 - protein, 70 aa, Synthetic construct
LNTAHPQLLVRKKRNICYDPRRFYVCPAVLGSQRFSSGRHYWEVEVGNKPKWILGVCQDCLLRNWQDQPS

SEQ ID NO: 19919 - protein, 70 aa, Synthetic construct
LNTAHPQLLVSEDRKICYDPRRFYVCPAVLGSQRFSSGRHYWEVEVGNKPKWILGVCQDCLLRNWQDQPS

SEQ ID NO: 19920 - protein, 70 aa, Synthetic construct
LNTAHPQLLVSEDRKAVRYERRFYVCPAVLGSQRFSSGRHYWEVEVGNKPKWILGVCQDCLLRNWQDQPS

SEQ ID NO: 19921 - protein, 70 aa, Synthetic construct
LNTAHPQLLVSEDRKAVRYERKKRNCPAVLGSQRFSSGRHYWEVEVGNKPKWILGVCQDCLLRNWQDQPS

SEQ ID NO: 19922 - protein, 70 aa, Synthetic construct
LNTAHPQLLVSEDRKAVRYERKKRNICYDPGSQRFSSGRHYWEVEVGNKPKWILGVCQDCLLRNWQDQPS

SEQ ID NO: 19923 - protein, 70 aa, Synthetic construct
LNTAHPQLLVSEDRKAVRYERKKRNICYDPRRFYVSSGRHYWEVEVGNKPKWILGVCQDCLLRNWQDQPS

SEQ ID NO: 19924 - protein, 70 aa, Synthetic construct
LNTAHPQLLVSEDRKAVRYERKKRNICYDPRRFYVCPAVLYWEVEVGNKPKWILGVCQDCLLRNWQDQPS

SEQ ID NO: 19925 - protein, 70 aa, Synthetic construct
LNTAHPQLLVSEDRKAVRYERKKRNICYDPRRFYVCPAVLGSQRFVGNKPKWILGVCQDCLLRNWQDQPS

SEQ ID NO: 19926 - protein, 70 aa, Synthetic construct
LNTAHPQLLVSEDRKAVRYERKKRNICYDPRRFYVCPAVLGSQRFSSGRHKWILGVCQDCLLRNWQDQPS

SEQ ID NO: 19927 - protein, 70 aa, Synthetic construct
LNTAHPQLLVSEDRKAVRYERKKRNICYDPRRFYVCPAVLGSQRFSSGRHYWEVEVCQDCLLRNWQDQPS

SEQ ID NO: 19928 - protein, 70 aa, Synthetic construct
LNTAHPQLLVSEDRKAVRYERKKRNICYDPRRFYVCPAVLGSQRFSSGRHYWEVEVGNKPKWILGVCQDC

SEQ ID NO: 19929 - protein, 70 aa, Synthetic construct
SIDLKYLGVQLPLAPATSFPFWNLTGTNPASPDAGFPFVSRTGKTNDFTKIKGWRGKFHSASASRNEGGN

SEQ ID NO: 19930 - protein, 70 aa, Synthetic construct
LKLNSYLGVQLPLAPATSFPFWNLTGTNPASPDAGFPFVSRTGKTNDFTKIKGWRGKFHSASASRNEGGN

SEQ ID NO: 19931 - protein, 70 aa, Synthetic construct
LKLNSVDPTMLPLAPATSFPFWNLTGTNPASPDAGFPFVSRTGKTNDFTKIKGWRGKFHSASASRNEGGN

SEQ ID NO: 19932 - protein, 70 aa, Synthetic construct
LKLNSVDPTMSIDLKATSFPFWNLTGTNPASPDAGFPFVSRTGKTNDFTKIKGWRGKFHSASASRNEGGN

SEQ ID NO: 19933 - protein, 70 aa, Synthetic construct
LKLNSVDPTMSIDLKYLGVQFWNLTGTNPASPDAGFPFVSRTGKTNDFTKIKGWRGKFHSASASRNEGGN

SEQ ID NO: 19934 - protein, 70 aa, Synthetic construct
LKLNSVDPTMSIDLKYLGVQLPLAPGTNPASPDAGFPFVSRTGKTNDFTKIKGWRGKFHSASASRNEGGN

SEQ ID NO: 19935 - protein, 70 aa, Synthetic construct
LKLNSVDPTMSIDLKYLGVQLPLAPATSFPSPDAGFPFVSRTGKTNDFTKIKGWRGKFHSASASRNEGGN

SEQ ID NO: 19936 - protein, 70 aa, Synthetic construct
LKLNSVDPTMSIDLKYLGVQLPLAPATSFPFWNLTFPFVSRTGKTNDFTKIKGWRGKFHSASASRNEGGN

SEQ ID NO: 19937 - protein, 70 aa, Synthetic construct
LKLNSVDPTMSIDLKYLGVQLPLAPATSFPFWNLTGTNPASPDAGFPFVSRTGKTNDFTKIKGWRGKFHS

SEQ ID NO: 19938 - protein, 70 aa, Synthetic construct
SPDAGFPFVSRTGKTNDFTKIKGWRGKFHSASASRNEGGNSESSLKNRSAFCSDKLDEYLENEGKLMETS

SEQ ID NO: 19939 - protein, 70 aa, Synthetic construct
FWNLTFPFVSRTGKTNDFTKIKGWRGKFHSASASRNEGGNSESSLKNRSAFCSDKLDEYLENEGKLMETS

SEQ ID NO: 19940 - protein, 70 aa, Synthetic construct
FWNLTGTNPASPDAGNDFTKIKGWRGKFHSASASRNEGGNSESSLKNRSAFCSDKLDEYLENEGKLMETS

SEQ ID NO: 19941 - protein, 70 aa, Synthetic construct
FWNLTGTNPASPDAGFPFVSIKGWRGKFHSASASRNEGGNSESSLKNRSAFCSDKLDEYLENEGKLMETS

SEQ ID NO: 19942 - protein, 70 aa, Synthetic construct
FWNLTGTNPASPDAGFPFVSRTGKTNDFTKIKGWRGKFHSSESSLKNRSAFCSDKLDEYLENEGKLMETS

SEQ ID NO: 19943 - protein, 70 aa, Synthetic construct
FWNLTGTNPASPDAGFPFVSRTGKTNDFTKIKGWRGKFHSASASRKNRSAFCSDKLDEYLENEGKLMETS

SEQ ID NO: 19944 - protein, 70 aa, Synthetic construct
FWNLTGTNPASPDAGFPFVSRTGKTNDFTKIKGWRGKFHSASASRNEGGNFCSDKLDEYLENEGKLMETS

SEQ ID NO: 19945 - protein, 70 aa, Synthetic construct
FWNLTGTNPASPDAGFPFVSRTGKTNDFTKIKGWRGKFHSASASRNEGGNSESSLLDEYLENEGKLMETS

SEQ ID NO: 19946 - protein, 70 aa, Synthetic construct
FWNLTGTNPASPDAGFPFVSRTGKTNDFTKIKGWRGKFHSASASRNEGGNSESSLKNRSAENEGKLMETS

SEQ ID NO: 19947 - protein, 70 aa, Synthetic construct
FWNLTGTNPASPDAGFPFVSRTGKTNDFTKIKGWRGKFHSASASRNEGGNSESSLKNRSAFCSDKLMETS

SEQ ID NO: 19948 - protein, 70 aa, Synthetic construct
FWNLTGTNPASPDAGFPFVSRTGKTNDFTKIKGWRGKFHSASASRNEGGNSESSLKNRSAFCSDKLDEYL

SEQ ID NO: 19949 - protein, 70 aa, Synthetic construct
SDLLGKSGITEDARVLKTECDSWSRISNPSAFSIVPRRAAKSSRGNGHFQGHLLLPGEQIQPKQEKKGGR

SEQ ID NO: 19950 - protein, 70 aa, Synthetic construct
SDVFQQEQGIEDARVLKTECDSWSRISNPSAFSIVPRRAAKSSRGNGHFQGHLLLPGEQIQPKQEKKGGR

SEQ ID NO: 19951 - protein, 70 aa, Synthetic construct
NDDLFMMPRIVNVTSGGSKYPHEVPDSKPSDHLKDTVRNEDNSLEDKGRISSRGNRDGRVTLGPTQVFLA

SEQ ID NO: 19952 - protein, 70 aa, Synthetic construct
NDDLFMMPRIVNVTSLATEGPHEVPDSKPSDHLKDTVRNEDNSLEDKGRISSRGNRDGRVTLGPTQVFLA

SEQ ID NO: 19953 - protein, 70 aa, Synthetic construct
NDDLFMMPRIVNVTSLATEGGLVDMDSKPSDHLKDTVRNEDNSLEDKGRISSRGNRDGRVTLGPTQVFLA

SEQ ID NO: 19954 - protein, 70 aa, Synthetic construct
NDDLFMMPRIVNVTSLATEGGLVDMGGSKYDHLKDTVRNEDNSLEDKGRISSRGNRDGRVTLGPTQVFLA

SEQ ID NO: 19955 - protein, 70 aa, Synthetic construct
NDDLFMMPRIVNVTSLATEGGLVDMGGSKYPHEVPTVRNEDNSLEDKGRISSRGNRDGRVTLGPTQVFLA

SEQ ID NO: 19956 - protein, 70 aa, Synthetic construct
NDDLFMMPRIVNVTSLATEGGLVDMGGSKYPHEVPDSKPSDNSLEDKGRISSRGNRDGRVTLGPTQVFLA

SEQ ID NO: 19957 - protein, 70 aa, Synthetic construct
NDDLFMMPRIVNVTSLATEGGLVDMGGSKYPHEVPDSKPSDHLKDDKGRISSRGNRDGRVTLGPTQVFLA

SEQ ID NO: 19958 - protein, 70 aa, Synthetic construct
NDDLFMMPRIVNVTSLATEGGLVDMGGSKYPHEVPDSKPSDHLKDTVRNESSRGNRDGRVTLGPTQVFLA

SEQ ID NO: 19959 - protein, 70 aa, Synthetic construct
NDDLFMMPRIVNVTSLATEGGLVDMGGSKYPHEVPDSKPSDHLKDTVRNEDNSLERDGRVTLGPTQVFLA

SEQ ID NO: 19960 - protein, 70 aa, Synthetic construct
NDDLFMMPRIVNVTSLATEGGLVDMGGSKYPHEVPDSKPSDHLKDTVRNEDNSLEDKGRITLGPTQVFLA

SEQ ID NO: 19961 - protein, 70 aa, Synthetic construct
NDDLFMMPRIVNVTSLATEGGLVDMGGSKYPHEVPDSKPSDHLKDTVRNEDNSLEDKGRISSRGNQVFLA

SEQ ID NO: 19962 - protein, 70 aa, Synthetic construct
NDDLFMMPRIVNVTSLATEGGLVDMGGSKYPHEVPDSKPSDHLKDTVRNEDNSLEDKGRISSRGNRDGRV

SEQ ID NO: 19963 - protein, 70 aa, Synthetic construct
GLNDALDNLRRVMPCYSKTQKLSKIETLRLARNYIWALSEVLETGQTPEGKGFVEMLCKGLSQPTSNLVA

SEQ ID NO: 19964 - protein, 70 aa, Synthetic construct
NSNVIIENLQSTKVAVAQFSQEARCGGASGGKLAVPALMEQLLALQQQQIHQLQLIEQIRHQILLLASQN

SEQ ID NO: 19965 - protein, 70 aa, Synthetic construct
LTTLGIENLQSTKVAVAQFSQEARCGGASGGKLAVPALMEQLLALQQQQIHQLQLIEQIRHQILLLASQN

SEQ ID NO: 19966 - protein, 70 aa, Synthetic construct
LTTLGNFSVISTKVAVAQFSQEARCGGASGGKLAVPALMEQLLALQQQQIHQLQLIEQIRHQILLLASQN

SEQ ID NO: 19967 - protein, 70 aa, Synthetic construct
LTTLGNFSVINSNVIVAQFSQEARCGGASGGKLAVPALMEQLLALQQQQIHQLQLIEQIRHQILLLASQN

SEQ ID NO: 19968 - protein, 70 aa, Synthetic construct
LTTLGNFSVINSNVIIENLQQEARCGGASGGKLAVPALMEQLLALQQQQIHQLQLIEQIRHQILLLASQN

SEQ ID NO: 19969 - protein, 70 aa, Synthetic construct
LTTLGNFSVINSNVIIENLQSTKVAGGASGGKLAVPALMEQLLALQQQQIHQLQLIEQIRHQILLLASQN

SEQ ID NO: 19970 - protein, 70 aa, Synthetic construct
LTTLGNFSVINSNVIIENLQSTKVAVAQFSGKLAVPALMEQLLALQQQQIHQLQLIEQIRHQILLLASQN

SEQ ID NO: 19971 - protein, 70 aa, Synthetic construct
LTTLGNFSVINSNVIIENLQSTKVAVAQFSQEARCPALMEQLLALQQQQIHQLQLIEQIRHQILLLASQN

SEQ ID NO: 19972 - protein, 70 aa, Synthetic construct
LTTLGNFSVINSNVIIENLQSTKVAVAQFSQEARCGGASGGKLAVQQQQIHQLQLIEQIRHQILLLASQN

SEQ ID NO: 19973 - protein, 70 aa, Synthetic construct
LTTLGNFSVINSNVIIENLQSTKVAVAQFSQEARCGGASGGKLAVPALMEQLLALIEQIRHQILLLASQN

SEQ ID NO: 19974 - protein, 70 aa, Synthetic construct
TTSVGLPLPPTLPSLIPFIKTEEPAPIPISHSATSPPGSVKSDSGGPESATRNLGGLPEEAEGSTLPPSG

SEQ ID NO: 19975 - protein, 70 aa, Synthetic construct
LDTKPLPLPPTLPSLIPFIKTEEPAPIPISHSATSPPGSVKSDSGGPESATRNLGGLPEEAEGSTLPPSG

SEQ ID NO: 19976 - protein, 70 aa, Synthetic construct
LDTKPVLPTLTLPSLIPFIKTEEPAPIPISHSATSPPGSVKSDSGGPESATRNLGGLPEEAEGSTLPPSG

SEQ ID NO: 19977 - protein, 70 aa, Synthetic construct
LDTKPVLPTLTTSVGIPFIKTEEPAPIPISHSATSPPGSVKSDSGGPESATRNLGGLPEEAEGSTLPPSG

SEQ ID NO: 19978 - protein, 70 aa, Synthetic construct
LDTKPVLPTLTTSVGLPLPPTLPSLIPFIKTEEPAPPGSVKSDSGGPESATRNLGGLPEEAEGSTLPPSG

SEQ ID NO: 19979 - protein, 70 aa, Synthetic construct
LDTKPVLPTLTTSVGLPLPPTLPSLIPFIKTEEPAPIPISKSDSGGPESATRNLGGLPEEAEGSTLPPSG

SEQ ID NO: 19980 - protein, 70 aa, Synthetic construct
LDTKPVLPTLTTSVGLPLPPTLPSLIPFIKTEEPAPIPISHSATSGPESATRNLGGLPEEAEGSTLPPSG

SEQ ID NO: 19981 - protein, 70 aa, Synthetic construct
LDTKPVLPTLTTSVGLPLPPTLPSLIPFIKTEEPAPIPISHSATSPPGSVTRNLGGLPEEAEGSTLPPSG

SEQ ID NO: 19982 - protein, 70 aa, Synthetic construct
LDTKPVLPTLTTSVGLPLPPTLPSLIPFIKTEEPAPIPISHSATSPPGSVKSDSGGLPEEAEGSTLPPSG

SEQ ID NO: 19983 - protein, 70 aa, Synthetic construct
LDTKPVLPTLTTSVGLPLPPTLPSLIPFIKTEEPAPIPISHSATSPPGSVKSDSGGPESAAEGSTLPPSG

SEQ ID NO: 19984 - protein, 70 aa, Synthetic construct
LDTKPVLPTLTTSVGLPLPPTLPSLIPFIKTEEPAPIPISHSATSPPGSVKSDSGGPESATRNLGLPPSG

SEQ ID NO: 19985 - protein, 70 aa, Synthetic construct
LDTKPVLPTLTTSVGLPLPPTLPSLIPFIKTEEPAPIPISHSATSPPGSVKSDSGGPESATRNLGGLPEE

SEQ ID NO: 19986 - protein, 70 aa, Synthetic construct
EVEVLSPAKEPVQPGMPLTVVAPAELVVPANCLAQLIDVKVVNGTQQLVLKLFPLEENNCLEAGRDNGGN

SEQ ID NO: 19987 - protein, 70 aa, Synthetic construct
EVNLFSPAKEPVQPGMPLTVVAPAELVVPANCLAQLIDVKVVNGTQQLVLKLFPLEENNCLEAGRDNGGN

SEQ ID NO: 19988 - protein, 70 aa, Synthetic construct
EVNLFENKNVPVQPGMPLTVVAPAELVVPANCLAQLIDVKVVNGTQQLVLKLFPLEENNCLEAGRDNGGN

SEQ ID NO: 19989 - protein, 70 aa, Synthetic construct
EVNLFENKNVEVEVLMPLTVVAPAELVVPANCLAQLIDVKVVNGTQQLVLKLFPLEENNCLEAGRDNGGN

SEQ ID NO: 19990 - protein, 70 aa, Synthetic construct
EVNLFENKNVEVEVLSPAKEVAPAELVVPANCLAQLIDVKVVNGTQQLVLKLFPLEENNCLEAGRDNGGN

SEQ ID NO: 19991 - protein, 70 aa, Synthetic construct
EVNLFENKNVEVEVLSPAKEPVQPGLVVPANCLAQLIDVKVVNGTQQLVLKLFPLEENNCLEAGRDNGGN

SEQ ID NO: 19992 - protein, 70 aa, Synthetic construct
EVNLFENKNVEVEVLSPAKEPVQPGMPLTVNCLAQLIDVKVVNGTQQLVLKLFPLEENNCLEAGRDNGGN

SEQ ID NO: 19993 - protein, 70 aa, Synthetic construct
EVNLFENKNVEVEVLSPAKEPVQPGMPLTVVAPAELVVPANCLAQLIDVKVVNGTQQLVLKLFPLDNGGN

SEQ ID NO: 19994 - protein, 70 aa, Synthetic construct
EVNLFENKNVEVEVLSPAKEPVQPGMPLTVVAPAELVVPANCLAQLIDVKVVNGTQQLVLKLFPLEENNC

SEQ ID NO: 19995 - protein, 70 aa, Synthetic construct
QEDNQTEEHKAVSTVGQISSQHKSEYLHINITGEDRSQQPGDKPLELKNSERTNNTNDGPVISSVFSLSS

SEQ ID NO: 19996 - protein, 70 aa, Synthetic construct
PVKVVTEEHKAVSTVGQISSQHKSEYLHINITGEDRSQQPGDKPLELKNSERTNNTNDGPVISSVFSLSS

SEQ ID NO: 19997 - protein, 70 aa, Synthetic construct
PVKVVSSNRKAVSTVGQISSQHKSEYLHINITGEDRSQQPGDKPLELKNSERTNNTNDGPVISSVFSLSS

SEQ ID NO: 19998 - protein, 70 aa, Synthetic construct
PVKVVSSNRKQEDNQGQISSQHKSEYLHINITGEDRSQQPGDKPLELKNSERTNNTNDGPVISSVFSLSS

SEQ ID NO: 19999 - protein, 70 aa, Synthetic construct
PVKVVSSNRKQEDNQTEEHKQHKSEYLHINITGEDRSQQPGDKPLELKNSERTNNTNDGPVISSVFSLSS

SEQ ID NO: 20000 - protein, 70 aa, Synthetic construct
PVKVVSSNRKQEDNQTEEHKAVSTVYLHINITGEDRSQQPGDKPLELKNSERTNNTNDGPVISSVFSLSS

SEQ ID NO: 20001 - protein, 70 aa, Synthetic construct
PVKVVSSNRKQEDNQTEEHKAVSTVGQISSITGEDRSQQPGDKPLELKNSERTNNTNDGPVISSVFSLSS

SEQ ID NO: 20002 - protein, 70 aa, Synthetic construct
PVKVVSSNRKQEDNQTEEHKAVSTVGQISSQHKSERSQQPGDKPLELKNSERTNNTNDGPVISSVFSLSS

SEQ ID NO: 20003 - protein, 70 aa, Synthetic construct
PVKVVSSNRKQEDNQTEEHKAVSTVGQISSQHKSEYLHINGDKPLELKNSERTNNTNDGPVISSVFSLSS

SEQ ID NO: 20004 - protein, 70 aa, Synthetic construct
PVKVVSSNRKQEDNQTEEHKAVSTVGQISSQHKSEYLHINITGEDELKNSERTNNTNDGPVISSVFSLSS

SEQ ID NO: 20005 - protein, 70 aa, Synthetic construct
PVKVVSSNRKQEDNQTEEHKAVSTVGQISSQHKSEYLHINITGEDRSQQPERTNNTNDGPVISSVFSLSS

SEQ ID NO: 20006 - protein, 70 aa, Synthetic construct
PVKVVSSNRKQEDNQTEEHKAVSTVGQISSQHKSEYLHINITGEDRSQQPGDKPLTNDGPVISSVFSLSS

SEQ ID NO: 20007 - protein, 70 aa, Synthetic construct
QLIKCPRRNQPVIVLNHPDVDSPEVTNVMKVINKYKGNVLKVVLSERTRCQLGIRRHHVRLTYQNAEEAS

SEQ ID NO: 20008 - protein, 70 aa, Synthetic construct
QLRLIPRRNQPVIVLNHPDVDSPEVTNVMKVINKYKGNVLKVVLSERTRCQLGIRRHHVRLTYQNAEEAS

SEQ ID NO: 20009 - protein, 70 aa, Synthetic construct
QLRLIAAKPDPVIVLNHPDVDSPEVTNVMKVINKYKGNVLKVVLSERTRCQLGIRRHHVRLTYQNAEEAS

SEQ ID NO: 20010 - protein, 70 aa, Synthetic construct
QLRLIAAKPDQLIKCPRRNQPVIVLTNVMKVINKYKGNVLKVVLSERTRCQLGIRRHHVRLTYQNAEEAS

SEQ ID NO: 20011 - protein, 70 aa, Synthetic construct
QLRLIAAKPDQLIKCPRRNQPVIVLNHPDVVINKYKGNVLKVVLSERTRCQLGIRRHHVRLTYQNAEEAS

SEQ ID NO: 20012 - protein, 70 aa, Synthetic construct
QLRLIAAKPDQLIKCPRRNQPVIVLNHPDVDSPEVTNVMKVINKYKGNVLQLGIRRHHVRLTYQNAEEAS

SEQ ID NO: 20013 - protein, 70 aa, Synthetic construct
QLRLIAAKPDQLIKCPRRNQPVIVLNHPDVDSPEVTNVMKVINKYKGNVLKVVLSRHHVRLTYQNAEEAS

SEQ ID NO: 20014 - protein, 70 aa, Synthetic construct
QLRLIAAKPDQLIKCPRRNQPVIVLNHPDVDSPEVTNVMKVINKYKGNVLKVVLSERTRCLTYQNAEEAS

SEQ ID NO: 20015 - protein, 70 aa, Synthetic construct
QLRLIAAKPDQLIKCPRRNQPVIVLNHPDVDSPEVTNVMKVINKYKGNVLKVVLSERTRCQLGIRAEEAS

SEQ ID NO: 20016 - protein, 70 aa, Synthetic construct
QLRLIAAKPDQLIKCPRRNQPVIVLNHPDVDSPEVTNVMKVINKYKGNVLKVVLSERTRCQLGIRRHHVR

SEQ ID NO: 20017 - protein, 70 aa, Synthetic construct
QIKRQMMLKMKLKKVHKNNYQVVDSLPDDSSQCVFKCWFCGRLYEDQEEWMSHGQRHLIEATRDWDVLSS

SEQ ID NO: 20018 - protein, 70 aa, Synthetic construct
LTYQNMMLKMKLKKVHKNNYQVVDSLPDDSSQCVFKCWFCGRLYEDQEEWMSHGQRHLIEATRDWDVLSS

SEQ ID NO: 20019 - protein, 70 aa, Synthetic construct
LTYQNAEEASKLKKVHKNNYQVVDSLPDDSSQCVFKCWFCGRLYEDQEEWMSHGQRHLIEATRDWDVLSS

SEQ ID NO: 20020 - protein, 70 aa, Synthetic construct
LTYQNAEEASQIKRQHKNNYQVVDSLPDDSSQCVFKCWFCGRLYEDQEEWMSHGQRHLIEATRDWDVLSS

SEQ ID NO: 20021 - protein, 70 aa, Synthetic construct
LTYQNAEEASQIKRQMMLKMQVVDSLPDDSSQCVFKCWFCGRLYEDQEEWMSHGQRHLIEATRDWDVLSS

SEQ ID NO: 20022 - protein, 70 aa, Synthetic construct
LTYQNAEEASQIKRQMMLKMKLKKVLPDDSSQCVFKCWFCGRLYEDQEEWMSHGQRHLIEATRDWDVLSS

SEQ ID NO: 20023 - protein, 70 aa, Synthetic construct
LTYQNAEEASQIKRQMMLKMKLKKVHKNNYSQCVFKCWFCGRLYEDQEEWMSHGQRHLIEATRDWDVLSS

SEQ ID NO: 20024 - protein, 70 aa, Synthetic construct
LTYQNAEEASQIKRQMMLKMKLKKVHKNNYQVVDSLPDDSSQCVFKCWFCGRLYERHLIEATRDWDVLSS

SEQ ID NO: 20025 - protein, 70 aa, Synthetic construct
RRRTVLAYAGYIPYPKEELPLRSSPSPANSTAGTIDSDGWDAGFSDIASSVPLPVSDRCFSHLQPTLLQR

SEQ ID NO: 20026 - protein, 70 aa, Synthetic construct
RRRTVEDFNKFCTFVLAYAGLRSSPSPANSTAGTIDSDGWDAGFSDIASSVPLPVSDRCFSHLQPTLLQR

SEQ ID NO: 20027 - protein, 70 aa, Synthetic construct
RRRTVEDFNKFCTFVLAYAGYIPYPSPANSTAGTIDSDGWDAGFSDIASSVPLPVSDRCFSHLQPTLLQR

SEQ ID NO: 20028 - protein, 70 aa, Synthetic construct
RRRTVEDFNKFCTFVLAYAGYIPYPKEELPTAGTIDSDGWDAGFSDIASSVPLPVSDRCFSHLQPTLLQR

SEQ ID NO: 20029 - protein, 70 aa, Synthetic construct
RRRTVEDFNKFCTFVLAYAGYIPYPKEELPLRSSPDSDGWDAGFSDIASSVPLPVSDRCFSHLQPTLLQR

SEQ ID NO: 20030 - protein, 70 aa, Synthetic construct
RRRTVEDFNKFCTFVLAYAGYIPYPKEELPLRSSPSPANSDAGFSDIASSVPLPVSDRCFSHLQPTLLQR

SEQ ID NO: 20031 - protein, 70 aa, Synthetic construct
RRRTVEDFNKFCTFVLAYAGYIPYPKEELPLRSSPSPANSTAGTIDIASSVPLPVSDRCFSHLQPTLLQR

SEQ ID NO: 20032 - protein, 70 aa, Synthetic construct
RRRTVEDFNKFCTFVLAYAGYIPYPKEELPLRSSPSPANSTAGTIDSDGWVPLPVSDRCFSHLQPTLLQR

SEQ ID NO: 20033 - protein, 70 aa, Synthetic construct
RRRTVEDFNKFCTFVLAYAGYIPYPKEELPLRSSPSPANSTAGTIDSDGWDAGFSSDRCFSHLQPTLLQR

SEQ ID NO: 20034 - protein, 70 aa, Synthetic construct
RRRTVEDFNKFCTFVLAYAGYIPYPKEELPLRSSPSPANSTAGTIDSDGWDAGFSDIASSSHLQPTLLQR

SEQ ID NO: 20035 - protein, 70 aa, Synthetic construct
RRRTVEDFNKFCTFVLAYAGYIPYPKEELPLRSSPSPANSTAGTIDSDGWDAGFSDIASSVPLPVTLLQR

SEQ ID NO: 20036 - protein, 70 aa, Synthetic construct
RRRTVEDFNKFCTFVLAYAGYIPYPKEELPLRSSPSPANSTAGTIDSDGWDAGFSDIASSVPLPVSDRCF

SEQ ID NO: 20037 - protein, 70 aa, Synthetic construct
QSLNEAFAALRKIIPTLPSDKLSKIQTLKLAARYIDFLYQMASCSYVAHERLSYAFSVWRMEGAWSMSAS

SEQ ID NO: 20038 - protein, 70 aa, Synthetic construct
QSLNEAFAALRKIIPTLPSDKLSKIQTLKLAARYIDFLYQVLQSDYVAHERLSYAFSVWRMEGAWSMSAS

SEQ ID NO: 20039 - protein, 70 aa, Synthetic construct
QSLNEAFAALRKIIPTLPSDKLSKIQTLKLAARYIDFLYQVLQSDELDSKRLSYAFSVWRMEGAWSMSAS

SEQ ID NO: 20040 - protein, 70 aa, Synthetic construct
QSLNEAFAALRKIIPTLPSDKLSKIQTLKLAARYIDFLYQVLQSDELDSKMASCSFSVWRMEGAWSMSAS

SEQ ID NO: 20041 - protein, 70 aa, Synthetic construct
QSLNEAFAALRKIIPTLPSDKLSKIQTLKLAARYIDFLYQVLQSDELDSKMASCSYVAHEMEGAWSMSAS

SEQ ID NO: 20042 - protein, 70 aa, Synthetic construct
QSLNEAFAALRKIIPTLPSDKLSKIQTLKLAARYIDFLYQVLQSDELDSKMASCSYVAHERLSYASMSAS

SEQ ID NO: 20043 - protein, 70 aa, Synthetic construct
QSLNEAFAALRKIIPTLPSDKLSKIQTLKLAARYIDFLYQVLQSDELDSKMASCSYVAHERLSYAFSVWR

SEQ ID NO: 20044 - protein, 70 aa, Synthetic construct
QIQPVPVKQESGTGPASPGQAPENVKVAQLLVNIQGQTFALVPQVVPSSNLNLPSKFVRIAPVPIAAKPV

SEQ ID NO: 20045 - protein, 70 aa, Synthetic construct
TPDGPPVKQESGTGPASPGQAPENVKVAQLLVNIQGQTFALVPQVVPSSNLNLPSKFVRIAPVPIAAKPV

SEQ ID NO: 20046 - protein, 70 aa, Synthetic construct
TPDGPIPVLLQIQPVASPGQAPENVKVAQLLVNIQGQTFALVPQVVPSSNLNLPSKFVRIAPVPIAAKPV

SEQ ID NO: 20047 - protein, 70 aa, Synthetic construct
TPDGPIPVLLQIQPVPVKQEAPENVKVAQLLVNIQGQTFALVPQVVPSSNLNLPSKFVRIAPVPIAAKPV

SEQ ID NO: 20048 - protein, 70 aa, Synthetic construct
TPDGPIPVLLQIQPVPVKQESGTGPKVAQLLVNIQGQTFALVPQVVPSSNLNLPSKFVRIAPVPIAAKPV

SEQ ID NO: 20049 - protein, 70 aa, Synthetic construct
TPDGPIPVLLQIQPVPVKQESGTGPASPGQLVNIQGQTFALVPQVVPSSNLNLPSKFVRIAPVPIAAKPV

SEQ ID NO: 20050 - protein, 70 aa, Synthetic construct
TPDGPIPVLLQIQPVPVKQESGTGPASPGQAPENVGQTFALVPQVVPSSNLNLPSKFVRIAPVPIAAKPV

SEQ ID NO: 20051 - protein, 70 aa, Synthetic construct
TPDGPIPVLLQIQPVPVKQESGTGPASPGQAPENVKVAQLLVPQVVPSSNLNLPSKFVRIAPVPIAAKPV

SEQ ID NO: 20052 - protein, 70 aa, Synthetic construct
TPDGPIPVLLQIQPVPVKQESGTGPASPGQAPENVKVAQLLVNIQVPSSNLNLPSKFVRIAPVPIAAKPV

SEQ ID NO: 20053 - protein, 70 aa, Synthetic construct
TPDGPIPVLLQIQPVPVKQESGTGPASPGQAPENVKVAQLLVNIQGQTFALNLPSKFVRIAPVPIAAKPV

SEQ ID NO: 20054 - protein, 70 aa, Synthetic construct
TPDGPIPVLLQIQPVPVKQESGTGPASPGQAPENVKVAQLLVNIQGQTFALVPQVKFVRIAPVPIAAKPV

SEQ ID NO: 20055 - protein, 70 aa, Synthetic construct
TPDGPIPVLLQIQPVPVKQESGTGPASPGQAPENVKVAQLLVNIQGQTFALVPQVVPSSNAPVPIAAKPV

SEQ ID NO: 20056 - protein, 70 aa, Synthetic construct
TPDGPIPVLLQIQPVPVKQESGTGPASPGQAPENVKVAQLLVNIQGQTFALVPQVVPSSNLNLPSAAKPV

SEQ ID NO: 20057 - protein, 70 aa, Synthetic construct
TPDGPIPVLLQIQPVPVKQESGTGPASPGQAPENVKVAQLLVNIQGQTFALVPQVVPSSNLNLPSKFVRI

SEQ ID NO: 20058 - protein, 70 aa, Synthetic construct
IDSNRREGRRQSFGGSLFAYSPGGAHGMLSSPKLPVSSLGLAASTNGSSITPAPKIKKEEDSAIPITVPG

SEQ ID NO: 20059 - protein, 70 aa, Synthetic construct
LSNPNREGRRQSFGGSLFAYSPGGAHGMLSSPKLPVSSLGLAASTNGSSITPAPKIKKEEDSAIPITVPG

SEQ ID NO: 20060 - protein, 70 aa, Synthetic construct
LSNPNELQAAQSFGGSLFAYSPGGAHGMLSSPKLPVSSLGLAASTNGSSITPAPKIKKEEDSAIPITVPG

SEQ ID NO: 20061 - protein, 70 aa, Synthetic construct
LSNPNELQAAIDSNRSLFAYSPGGAHGMLSSPKLPVSSLGLAASTNGSSITPAPKIKKEEDSAIPITVPG

SEQ ID NO: 20062 - protein, 70 aa, Synthetic construct
LSNPNELQAAIDSNRREGRRSPGGAHGMLSSPKLPVSSLGLAASTNGSSITPAPKIKKEEDSAIPITVPG

SEQ ID NO: 20063 - protein, 70 aa, Synthetic construct
LSNPNELQAAIDSNRREGRRQSFGGHGMLSSPKLPVSSLGLAASTNGSSITPAPKIKKEEDSAIPITVPG

SEQ ID NO: 20064 - protein, 70 aa, Synthetic construct
LSNPNELQAAIDSNRREGRRQSFGGSLFAYSPKLPVSSLGLAASTNGSSITPAPKIKKEEDSAIPITVPG

SEQ ID NO: 20065 - protein, 70 aa, Synthetic construct
LSNPNELQAAIDSNRREGRRQSFGGSLFAYSPGGAVSSLGLAASTNGSSITPAPKIKKEEDSAIPITVPG

SEQ ID NO: 20066 - protein, 70 aa, Synthetic construct
LSNPNELQAAIDSNRREGRRQSFGGSLFAYSPGGAHGMLSLAASTNGSSITPAPKIKKEEDSAIPITVPG

SEQ ID NO: 20067 - protein, 70 aa, Synthetic construct
LSNPNELQAAIDSNRREGRRQSFGGSLFAYSPGGAHGMLSSPKLPNGSSITPAPKIKKEEDSAIPITVPG

SEQ ID NO: 20068 - protein, 70 aa, Synthetic construct
LSNPNELQAAIDSNRREGRRQSFGGSLFAYSPGGAHGMLSSPKLPVSSLGTPAPKIKKEEDSAIPITVPG

SEQ ID NO: 20069 - protein, 70 aa, Synthetic construct
LSNPNELQAAIDSNRREGRRQSFGGSLFAYSPGGAHGMLSSPKLPVSSLGLAASTIKKEEDSAIPITVPG

SEQ ID NO: 20070 - protein, 70 aa, Synthetic construct
LSNPNELQAAIDSNRREGRRQSFGGSLFAYSPGGAHGMLSSPKLPVSSLGLAASTNGSSITPAPKIKKEE

SEQ ID NO: 20071 - protein, 70 aa, Synthetic construct
FLAMAAQLPMSIRINSQASESRQDSAVNLTGTNGSNSISMSVEINGIMYTGVLFAQPPAPTPTSAPNKGG

SEQ ID NO: 20072 - protein, 70 aa, Synthetic construct
RLMQRAQLPMSIRINSQASESRQDSAVNLTGTNGSNSISMSVEINGIMYTGVLFAQPPAPTPTSAPNKGG

SEQ ID NO: 20073 - protein, 70 aa, Synthetic construct
RLMQRALQQNSIRINSQASESRQDSAVNLTGTNGSNSISMSVEINGIMYTGVLFAQPPAPTPTSAPNKGG

SEQ ID NO: 20074 - protein, 70 aa, Synthetic construct
RLMQRALQQNFLAMASQASESRQDSAVNLTGTNGSNSISMSVEINGIMYTGVLFAQPPAPTPTSAPNKGG

SEQ ID NO: 20075 - protein, 70 aa, Synthetic construct
RLMQRALQQNFLAMAAQLPMSRQDSAVNLTGTNGSNSISMSVEINGIMYTGVLFAQPPAPTPTSAPNKGG

SEQ ID NO: 20076 - protein, 70 aa, Synthetic construct
RLMQRALQQNFLAMAAQLPMSIRINAVNLTGTNGSNSISMSVEINGIMYTGVLFAQPPAPTPTSAPNKGG

SEQ ID NO: 20077 - protein, 70 aa, Synthetic construct
RLMQRALQQNFLAMAAQLPMSIRINSQASEGTNGSNSISMSVEINGIMYTGVLFAQPPAPTPTSAPNKGG

SEQ ID NO: 20078 - protein, 70 aa, Synthetic construct
RLMQRALQQNFLAMAAQLPMSIRINSQASESRQDSNSISMSVEINGIMYTGVLFAQPPAPTPTSAPNKGG

SEQ ID NO: 20079 - protein, 70 aa, Synthetic construct
RLMQRALQQNFLAMAAQLPMSIRINSQASESRQDSAVNLTSVEINGIMYTGVLFAQPPAPTPTSAPNKGG

SEQ ID NO: 20080 - protein, 70 aa, Synthetic construct
RLMQRALQQNFLAMAAQLPMSIRINSQASESRQDSAVNLTGTNGSNSISMSVEINGIMYTGVLFAPNKGG

SEQ ID NO: 20081 - protein, 70 aa, Synthetic construct
RLMQRALQQNFLAMAAQLPMSIRINSQASESRQDSAVNLTGTNGSNSISMSVEINGIMYTGVLFAQPPAP

SEQ ID NO: 20082 - protein, 70 aa, Synthetic construct
NPSAWTVEDVVWFVKDADPQALGPHVELFRKHEIDGNALLLLKSDMVMKYLGLKLGPALKLCYHIDKLKQ

SEQ ID NO: 20083 - protein, 70 aa, Synthetic construct
AQDARRPRSRNPSAWTVEDVVWFVKVELFRKHEIDGNALLLLKSDMVMKYLGLKLGPALKLCYHIDKLKQ

SEQ ID NO: 20084 - protein, 70 aa, Synthetic construct
AQDARRPRSRNPSAWTVEDVVWFVKDADPQALGPHGNALLLLKSDMVMKYLGLKLGPALKLCYHIDKLKQ

SEQ ID NO: 20085 - protein, 70 aa, Synthetic construct
AQDARRPRSRNPSAWTVEDVVWFVKDADPQALGPHVELFRKHEIDGNALLLLKSDMVMKYLGLKLDKLKQ

SEQ ID NO: 20086 - protein, 70 aa, Synthetic construct
NSGREPRTPRTLLSIADILAPRMVPSGPGPTSPLCALEELTSKTFRGLDARALQPSEGRAGPDALGPGPF

SEQ ID NO: 20087 - protein, 70 aa, Synthetic construct
NSGREPRTPRTLLSIADILAPRMVPRAPSATSPLCALEELTSKTFRGLDARALQPSEGRAGPDALGPGPF

SEQ ID NO: 20088 - protein, 70 aa, Synthetic construct
NSGREPRTPRTLLSIADILAPRMVPRAPSAPQLPEALEELTSKTFRGLDARALQPSEGRAGPDALGPGPF

SEQ ID NO: 20089 - protein, 70 aa, Synthetic construct
NSGREPRTPRTLLSIADILAPRMVPRAPSAPQLPESGPGPTSKTFRGLDARALQPSEGRAGPDALGPGPF

SEQ ID NO: 20090 - protein, 70 aa, Synthetic construct
NSGREPRTPRTLLSIADILAPRMVPRAPSAPQLPESGPGPTSPLCRGLDARALQPSEGRAGPDALGPGPF

SEQ ID NO: 20091 - protein, 70 aa, Synthetic construct
NSGREPRTPRTLLSIADILAPRMVPRAPSAPQLPESGPGPTSPLCALEELRALQPSEGRAGPDALGPGPF

SEQ ID NO: 20092 - protein, 70 aa, Synthetic construct
NSGREPRTPRTLLSIADILAPRMVPRAPSAPQLPESGPGPTSPLCALEELTSKTFSEGRAGPDALGPGPF

SEQ ID NO: 20093 - protein, 70 aa, Synthetic construct
NSGREPRTPRTLLSIADILAPRMVPRAPSAPQLPESGPGPTSPLCALEELTSKTFRGLDAGPDALGPGPF

SEQ ID NO: 20094 - protein, 70 aa, Synthetic construct
NSGREPRTPRTLLSIADILAPRMVPRAPSAPQLPESGPGPTSPLCALEELTSKTFRGLDARALQPGPGPF

SEQ ID NO: 20095 - protein, 70 aa, Synthetic construct
NSGREPRTPRTLLSIADILAPRMVPRAPSAPQLPESGPGPTSPLCALEELTSKTFRGLDARALQPSEGRA

SEQ ID NO: 20096 - protein, 70 aa, Synthetic construct
LVPKTEICEEAEKPLIISERIQKADPQGPELGEACEKGNMLKRQRIKREKKDFRQVIVNDCHLPESFKEE

SEQ ID NO: 20097 - protein, 70 aa, Synthetic construct
LGAETEICEEAEKPLIISERIQKADPQGPELGEACEKGNMLKRQRIKREKKDFRQVIVNDCHLPESFKEE

SEQ ID NO: 20098 - protein, 70 aa, Synthetic construct
LGAETKNLQLAEKPLIISERIQKADPQGPELGEACEKGNMLKRQRIKREKKDFRQVIVNDCHLPESFKEE

SEQ ID NO: 20099 - protein, 70 aa, Synthetic construct
LGAETKNLQLLVPKTIISERIQKADPQGPELGEACEKGNMLKRQRIKREKKDFRQVIVNDCHLPESFKEE

SEQ ID NO: 20100 - protein, 70 aa, Synthetic construct
LGAETKNLQLLVPKTEICEEIQKADPQGPELGEACEKGNMLKRQRIKREKKDFRQVIVNDCHLPESFKEE

SEQ ID NO: 20101 - protein, 70 aa, Synthetic construct
LGAETKNLQLLVPKTEICEEAEKPLPQGPELGEACEKGNMLKRQRIKREKKDFRQVIVNDCHLPESFKEE

SEQ ID NO: 20102 - protein, 70 aa, Synthetic construct
LGAETKNLQLLVPKTEICEEAEKPLIISERLGEACEKGNMLKRQRIKREKKDFRQVIVNDCHLPESFKEE

SEQ ID NO: 20103 - protein, 70 aa, Synthetic construct
LGAETKNLQLLVPKTEICEEAEKPLIISERIQKADEKGNMLKRQRIKREKKDFRQVIVNDCHLPESFKEE

SEQ ID NO: 20104 - protein, 70 aa, Synthetic construct
LGAETKNLQLLVPKTEICEEAEKPLIISERIQKADPQGPELKRQRIKREKKDFRQVIVNDCHLPESFKEE

SEQ ID NO: 20105 - protein, 70 aa, Synthetic construct
LGAETKNLQLLVPKTEICEEAEKPLIISERIQKADPQGPELGEACIKREKKDFRQVIVNDCHLPESFKEE

SEQ ID NO: 20106 - protein, 70 aa, Synthetic construct
LGAETKNLQLLVPKTEICEEAEKPLIISERIQKADPQGPELGEACEKGNMKDFRQVIVNDCHLPESFKEE

SEQ ID NO: 20107 - protein, 70 aa, Synthetic construct
LGAETKNLQLLVPKTEICEEAEKPLIISERIQKADPQGPELGEACEKGNMLKRQRVIVNDCHLPESFKEE

SEQ ID NO: 20108 - protein, 70 aa, Synthetic construct
LGAETKNLQLLVPKTEICEEAEKPLIISERIQKADPQGPELGEACEKGNMLKRQRIKREKCHLPESFKEE

SEQ ID NO: 20109 - protein, 70 aa, Synthetic construct
LGAETKNLQLLVPKTEICEEAEKPLIISERIQKADPQGPELGEACEKGNMLKRQRIKREKKDFRQSFKEE

SEQ ID NO: 20110 - protein, 70 aa, Synthetic construct
LGAETKNLQLLVPKTEICEEAEKPLIISERIQKADPQGPELGEACEKGNMLKRQRIKREKKDFRQVIVND

SEQ ID NO: 20111 - protein, 70 aa, Synthetic construct
VTSSFLIRDILADCKPLAACAPYSSSGQPAAPEPGGRLAAKAAEDFRDKLDKSGSNASSDSEYKVKEEGD

SEQ ID NO: 20112 - protein, 70 aa, Synthetic construct
QLSAPAQSRTVTSSFLIRDILADCKSGQPAAPEPGGRLAAKAAEDFRDKLDKSGSNASSDSEYKVKEEGD

SEQ ID NO: 20113 - protein, 70 aa, Synthetic construct
QLSAPAQSRTVTSSFLIRDILADCKPLAACAPEPGGRLAAKAAEDFRDKLDKSGSNASSDSEYKVKEEGD

SEQ ID NO: 20114 - protein, 70 aa, Synthetic construct
QLSAPAQSRTVTSSFLIRDILADCKPLAACAPYSSGRLAAKAAEDFRDKLDKSGSNASSDSEYKVKEEGD

SEQ ID NO: 20115 - protein, 70 aa, Synthetic construct
QLSAPAQSRTVTSSFLIRDILADCKPLAACAPYSSSGQPAKAAEDFRDKLDKSGSNASSDSEYKVKEEGD

SEQ ID NO: 20116 - protein, 70 aa, Synthetic construct
QLSAPAQSRTVTSSFLIRDILADCKPLAACAPYSSSGQPAAPEPGFRDKLDKSGSNASSDSEYKVKEEGD

SEQ ID NO: 20117 - protein, 70 aa, Synthetic construct
QLSAPAQSRTVTSSFLIRDILADCKPLAACAPYSSSGQPAAPEPGGRLAADKSGSNASSDSEYKVKEEGD

SEQ ID NO: 20118 - protein, 70 aa, Synthetic construct
QLSAPAQSRTVTSSFLIRDILADCKPLAACAPYSSSGQPAAPEPGGRLAAKAAEDNASSDSEYKVKEEGD

SEQ ID NO: 20119 - protein, 70 aa, Synthetic construct
QLSAPAQSRTVTSSFLIRDILADCKPLAACAPYSSSGQPAAPEPGGRLAAKAAEDFRDKLSEYKVKEEGD

SEQ ID NO: 20120 - protein, 70 aa, Synthetic construct
SEYKVKEEGDPVRLKKPRKARTAFTDHQLAQLERSFERQKYLSVQDRMELAASLNLTDTQVKTWYQNRRT

SEQ ID NO: 20121 - protein, 70 aa, Synthetic construct
SEYKVKEEGDREISSKPRKARTAFTDHQLAQLERSFERQKYLSVQDRMELAASLNLTDTQVKTWYQNRRT

SEQ ID NO: 20122 - protein, 70 aa, Synthetic construct
SEYKVKEEGDREISSSRDSPRTAFTDHQLAQLERSFERQKYLSVQDRMELAASLNLTDTQVKTWYQNRRT

SEQ ID NO: 20123 - protein, 70 aa, Synthetic construct
SEYKVKEEGDREISSSRDSPPVRLKDHQLAQLERSFERQKYLSVQDRMELAASLNLTDTQVKTWYQNRRT

SEQ ID NO: 20124 - protein, 70 aa, Synthetic construct
SEYKVKEEGDREISSSRDSPPVRLKKPRKAQLERSFERQKYLSVQDRMELAASLNLTDTQVKTWYQNRRT

SEQ ID NO: 20125 - protein, 70 aa, Synthetic construct
SEYKVKEEGDREISSSRDSPPVRLKKPRKARTAFTFERQKYLSVQDRMELAASLNLTDTQVKTWYQNRRT

SEQ ID NO: 20126 - protein, 70 aa, Synthetic construct
SEYKVKEEGDREISSSRDSPPVRLKKPRKARTAFTDHQLAYLSVQDRMELAASLNLTDTQVKTWYQNRRT

SEQ ID NO: 20127 - protein, 70 aa, Synthetic construct
SEYKVKEEGDREISSSRDSPPVRLKKPRKARTAFTDHQLAQLERSDRMELAASLNLTDTQVKTWYQNRRT

SEQ ID NO: 20128 - protein, 70 aa, Synthetic construct
SEYKVKEEGDREISSSRDSPPVRLKKPRKARTAFTDHQLAQLERSFERQKYLSVQLTDTQVKTWYQNRRT

SEQ ID NO: 20129 - protein, 70 aa, Synthetic construct
SEYKVKEEGDREISSSRDSPPVRLKKPRKARTAFTDHQLAQLERSFERQKYLSVQDRMELAASLNLTDTQ

SEQ ID NO: 20130 - protein, 70 aa, Synthetic construct
SFRPYHTTDDLRMSSLPPLGLDPATAAAYYHPSYLAPHPFPHPAFRMDDSYCLSALRSPFYPIPTPGSLP

SEQ ID NO: 20131 - protein, 70 aa, Synthetic construct
PSTVTEDYLRLRMSSLPPLGLDPATAAAYYHPSYLAPHPFPHPAFRMDDSYCLSALRSPFYPIPTPGSLP

SEQ ID NO: 20132 - protein, 70 aa, Synthetic construct
PSTVTEDYLRSFRPYLPPLGLDPATAAAYYHPSYLAPHPFPHPAFRMDDSYCLSALRSPFYPIPTPGSLP

SEQ ID NO: 20133 - protein, 70 aa, Synthetic construct
PSTVTEDYLRSFRPYHTTDDLDPATAAAYYHPSYLAPHPFPHPAFRMDDSYCLSALRSPFYPIPTPGSLP

SEQ ID NO: 20134 - protein, 70 aa, Synthetic construct
PSTVTEDYLRSFRPYHTTDDLRMSSAAAYYHPSYLAPHPFPHPAFRMDDSYCLSALRSPFYPIPTPGSLP

SEQ ID NO: 20135 - protein, 70 aa, Synthetic construct
PSTVTEDYLRSFRPYHTTDDLRMSSLPPLGHPSYLAPHPFPHPAFRMDDSYCLSALRSPFYPIPTPGSLP

SEQ ID NO: 20136 - protein, 70 aa, Synthetic construct
PSTVTEDYLRSFRPYHTTDDLRMSSLPPLGLDPATAAAYYHPSYLRMDDSYCLSALRSPFYPIPTPGSLP

SEQ ID NO: 20137 - protein, 70 aa, Synthetic construct
PSTVTEDYLRSFRPYHTTDDLRMSSLPPLGLDPATAAAYYHPSYLAPHPFYCLSALRSPFYPIPTPGSLP

SEQ ID NO: 20138 - protein, 70 aa, Synthetic construct
PSTVTEDYLRSFRPYHTTDDLRMSSLPPLGLDPATAAAYYHPSYLAPHPFPHPAFLRSPFYPIPTPGSLP

SEQ ID NO: 20139 - protein, 70 aa, Synthetic construct
PSTVTEDYLRSFRPYHTTDDLRMSSLPPLGLDPATAAAYYHPSYLAPHPFPHPAFRMDDSYCLSALRSPF

SEQ ID NO: 20140 - protein, 70 aa, Synthetic construct
VRAHLRCVAEQPPLKLDTSSEKLEFLQLFGLTTQQQKEELVAQKRRKRRRMLRERRQTPSPRLALSTRYS

SEQ ID NO: 20141 - protein, 70 aa, Synthetic construct
PRLALSTRYSEEKKKFLTIFNLTHISAEKRKDKERLVEMLRAMKQKALSAAVADSLTNSPRDSPAVSLSE

SEQ ID NO: 20142 - protein, 70 aa, Synthetic construct
PRLALSTRYSPDEMNNSPNFEEKKKFLTIFKDKERLVEMLRAMKQKALSAAVADSLTNSPRDSPAVSLSE

SEQ ID NO: 20143 - protein, 70 aa, Synthetic construct
PRLALSTRYSPDEMNNSPNFEEKKKFLTIFNLTHISAEKRKDKERLVEMLAVADSLTNSPRDSPAVSLSE

SEQ ID NO: 20144 - protein, 70 aa, Synthetic construct
PRLALSTRYSPDEMNNSPNFEEKKKFLTIFNLTHISAEKRKDKERLVEMLRAMKQLTNSPRDSPAVSLSE

SEQ ID NO: 20145 - protein, 70 aa, Synthetic construct
PRLALSTRYSPDEMNNSPNFEEKKKFLTIFNLTHISAEKRKDKERLVEMLRAMKQKALSARDSPAVSLSE

SEQ ID NO: 20146 - protein, 70 aa, Synthetic construct
PRLALSTRYSPDEMNNSPNFEEKKKFLTIFNLTHISAEKRKDKERLVEMLRAMKQKALSAAVADSVSLSE

SEQ ID NO: 20147 - protein, 70 aa, Synthetic construct
PRLALSTRYSPDEMNNSPNFEEKKKFLTIFNLTHISAEKRKDKERLVEMLRAMKQKALSAAVADSLTNSP

SEQ ID NO: 20148 - protein, 70 aa, Synthetic construct
LPKGQMSREKQPDPESAPSQKLTGIAQPKKKVKVSVTSPSSPELVSPEEHADFSSFLLLVDAAVQRAAEL

SEQ ID NO: 20149 - protein, 70 aa, Synthetic construct
DNVQSMSREKQPDPESAPSQKLTGIAQPKKKVKVSVTSPSSPELVSPEEHADFSSFLLLVDAAVQRAAEL

SEQ ID NO: 20150 - protein, 70 aa, Synthetic construct
DNVQSLPLWPQPDPESAPSQKLTGIAQPKKKVKVSVTSPSSPELVSPEEHADFSSFLLLVDAAVQRAAEL

SEQ ID NO: 20151 - protein, 70 aa, Synthetic construct
DNVQSLPLWPLPKGQSAPSQKLTGIAQPKKKVKVSVTSPSSPELVSPEEHADFSSFLLLVDAAVQRAAEL

SEQ ID NO: 20152 - protein, 70 aa, Synthetic construct
DNVQSLPLWPLPKGQMSREKKLTGIAQPKKKVKVSVTSPSSPELVSPEEHADFSSFLLLVDAAVQRAAEL

SEQ ID NO: 20153 - protein, 70 aa, Synthetic construct
DNVQSLPLWPLPKGQMSREKQPDPEAQPKKKVKVSVTSPSSPELVSPEEHADFSSFLLLVDAAVQRAAEL

SEQ ID NO: 20154 - protein, 70 aa, Synthetic construct
DNVQSLPLWPLPKGQMSREKQPDPESAPSQKVKVSVTSPSSPELVSPEEHADFSSFLLLVDAAVQRAAEL

SEQ ID NO: 20155 - protein, 70 aa, Synthetic construct
DNVQSLPLWPLPKGQMSREKQPDPESAPSQKLTGIVTSPSSPELVSPEEHADFSSFLLLVDAAVQRAAEL

SEQ ID NO: 20156 - protein, 70 aa, Synthetic construct
DNVQSLPLWPLPKGQMSREKQPDPESAPSQKLTGIAQPKKSPELVSPEEHADFSSFLLLVDAAVQRAAEL

SEQ ID NO: 20157 - protein, 70 aa, Synthetic construct
DNVQSLPLWPLPKGQMSREKQPDPESAPSQKLTGIAQPKKKVKVSSPEEHADFSSFLLLVDAAVQRAAEL

SEQ ID NO: 20158 - protein, 70 aa, Synthetic construct
DNVQSLPLWPLPKGQMSREKQPDPESAPSQKLTGIAQPKKKVKVSVTSPSADFSSFLLLVDAAVQRAAEL

SEQ ID NO: 20159 - protein, 70 aa, Synthetic construct
DNVQSLPLWPLPKGQMSREKQPDPESAPSQKLTGIAQPKKKVKVSVTSPSSPELVFLLLVDAAVQRAAEL

SEQ ID NO: 20160 - protein, 70 aa, Synthetic construct
TSPDVGLLKLASPELERLIIQSSNGHITTTPTPTQFLCPKNVTDEQEGFAEGFVRALAELHSQNTLPSVT

SEQ ID NO: 20161 - protein, 70 aa, Synthetic construct
HLRAKGLLKLASPELERLIIQSSNGHITTTPTPTQFLCPKNVTDEQEGFAEGFVRALAELHSQNTLPSVT

SEQ ID NO: 20162 - protein, 70 aa, Synthetic construct
HLRAKNSDLLASPELERLIIQSSNGHITTTPTPTQFLCPKNVTDEQEGFAEGFVRALAELHSQNTLPSVT

SEQ ID NO: 20163 - protein, 70 aa, Synthetic construct
HLRAKNSDLLTSPDVERLIIQSSNGHITTTPTPTQFLCPKNVTDEQEGFAEGFVRALAELHSQNTLPSVT

SEQ ID NO: 20164 - protein, 70 aa, Synthetic construct
HLRAKNSDLLTSPDVGLLKLQSSNGHITTTPTPTQFLCPKNVTDEQEGFAEGFVRALAELHSQNTLPSVT

SEQ ID NO: 20165 - protein, 70 aa, Synthetic construct
HLRAKNSDLLTSPDVGLLKLASPELHITTTPTPTQFLCPKNVTDEQEGFAEGFVRALAELHSQNTLPSVT

SEQ ID NO: 20166 - protein, 70 aa, Synthetic construct
HLRAKNSDLLTSPDVGLLKLASPELERLIIPTPTQFLCPKNVTDEQEGFAEGFVRALAELHSQNTLPSVT

SEQ ID NO: 20167 - protein, 70 aa, Synthetic construct
HLRAKNSDLLTSPDVGLLKLASPELERLIIQSSNGFLCPKNVTDEQEGFAEGFVRALAELHSQNTLPSVT

SEQ ID NO: 20168 - protein, 70 aa, Synthetic construct
HLRAKNSDLLTSPDVGLLKLASPELERLIIQSSNGHITTTNVTDEQEGFAEGFVRALAELHSQNTLPSVT

SEQ ID NO: 20169 - protein, 70 aa, Synthetic construct
HLRAKNSDLLTSPDVGLLKLASPELERLIIQSSNGHITTTPTPTQQEGFAEGFVRALAELHSQNTLPSVT

SEQ ID NO: 20170 - protein, 70 aa, Synthetic construct
HLRAKNSDLLTSPDVGLLKLASPELERLIIQSSNGHITTTPTPTQFLCPKNVTDEQEGFAEGFVRALAEL

SEQ ID NO: 20171 - protein, 70 aa, Synthetic construct
KSELALSKQRRSRRKKANDRERNRMHNLNSALDALRGVLPTFPDDAKLTKIETLRFAHNYIWALTQTLRI

SEQ ID NO: 20172 - protein, 70 aa, Synthetic construct
RARRGLSKQRRSRRKKANDRERNRMHNLNSALDALRGVLPTFPDDAKLTKIETLRFAHNYIWALTQTLRI

SEQ ID NO: 20173 - protein, 70 aa, Synthetic construct
RARRGGRSRPRSRRKKANDRERNRMHNLNSALDALRGVLPTFPDDAKLTKIETLRFAHNYIWALTQTLRI

SEQ ID NO: 20174 - protein, 70 aa, Synthetic construct
RARRGGRSRPKSELAKANDRERNRMHNLNSALDALRGVLPTFPDDAKLTKIETLRFAHNYIWALTQTLRI

SEQ ID NO: 20175 - protein, 70 aa, Synthetic construct
RARRGGRSRPKSELALSKQRERNRMHNLNSALDALRGVLPTFPDDAKLTKIETLRFAHNYIWALTQTLRI

SEQ ID NO: 20176 - protein, 70 aa, Synthetic construct
RARRGGRSRPKSELALSKQRRSRRKHNLNSALDALRGVLPTFPDDAKLTKIETLRFAHNYIWALTQTLRI

SEQ ID NO: 20177 - protein, 70 aa, Synthetic construct
RARRGGRSRPKSELALSKQRRSRRKKANDRALDALRGVLPTFPDDAKLTKIETLRFAHNYIWALTQTLRI

SEQ ID NO: 20178 - protein, 70 aa, Synthetic construct
RARRGGRSRPKSELALSKQRRSRRKKANDRERNRMHNLNSTFPDDAKLTKIETLRFAHNYIWALTQTLRI

SEQ ID NO: 20179 - protein, 70 aa, Synthetic construct
RARRGGRSRPKSELALSKQRRSRRKKANDRERNRMHNLNSALDALAKLTKIETLRFAHNYIWALTQTLRI

SEQ ID NO: 20180 - protein, 70 aa, Synthetic construct
TKARLERFKLRRMKANARERNRMHGLNAALDNLRKVVPCYSKTQKLSKIETLRLAKNYIWALSEILRSGK

SEQ ID NO: 20181 - protein, 70 aa, Synthetic construct
KRRGPERFKLRRMKANARERNRMHGLNAALDNLRKVVPCYSKTQKLSKIETLRLAKNYIWALSEILRSGK

SEQ ID NO: 20182 - protein, 70 aa, Synthetic construct
KRRGPKKKKMRRMKANARERNRMHGLNAALDNLRKVVPCYSKTQKLSKIETLRLAKNYIWALSEILRSGK

SEQ ID NO: 20183 - protein, 70 aa, Synthetic construct
KRRGPKKKKMTKARLNARERNRMHGLNAALDNLRKVVPCYSKTQKLSKIETLRLAKNYIWALSEILRSGK

SEQ ID NO: 20184 - protein, 70 aa, Synthetic construct
KRRGPKKKKMTKARLERFKLNRMHGLNAALDNLRKVVPCYSKTQKLSKIETLRLAKNYIWALSEILRSGK

SEQ ID NO: 20185 - protein, 70 aa, Synthetic construct
KRRGPKKKKMTKARLERFKLRRMKALNAALDNLRKVVPCYSKTQKLSKIETLRLAKNYIWALSEILRSGK

SEQ ID NO: 20186 - protein, 70 aa, Synthetic construct
KRRGPKKKKMTKARLERFKLRRMKANARERDNLRKVVPCYSKTQKLSKIETLRLAKNYIWALSEILRSGK

SEQ ID NO: 20187 - protein, 70 aa, Synthetic construct
KRRGPKKKKMTKARLERFKLRRMKANARERNRMHGVVPCYSKTQKLSKIETLRLAKNYIWALSEILRSGK

SEQ ID NO: 20188 - protein, 70 aa, Synthetic construct
NRMHGLNAALDNLRKLSKIETLRLAKNYIWALSEILRSGKSPDLVSFVQTLCKGLSQPTTNLVAGCLQLN

SEQ ID NO: 20189 - protein, 70 aa, Synthetic construct
NRMHGLNAALDNLRKVVPCYSKTQKLSKIETLRLAKNYIWALSEILRSGKSPDLVSQPTTNLVAGCLQLN

SEQ ID NO: 20190 - protein, 70 aa, Synthetic construct
NRMHGLNAALDNLRKVVPCYSKTQKLSKIETLRLAKNYIWALSEILRSGKSPDLVSFVQTLCKGLSQPTT

SEQ ID NO: 20191 - protein, 70 aa, Synthetic construct
RKPDINCFMIGDCIRITEKMAKAIREWYCRECREKDPKLEIRYRHKKSRERDGNERDSSEPRDEGGGRKR

SEQ ID NO: 20192 - protein, 70 aa, Synthetic construct
RKPDINCFMIGCDNCNEWFHAKAIREWYCRECREKDPKLEIRYRHKKSRERDGNERDSSEPRDEGGGRKR

SEQ ID NO: 20193 - protein, 70 aa, Synthetic construct
RKPDINCFMIGCDNCNEWFHGDCIREWYCRECREKDPKLEIRYRHKKSRERDGNERDSSEPRDEGGGRKR

SEQ ID NO: 20194 - protein, 70 aa, Synthetic construct
RKPDINCFMIGCDNCNEWFHGDCIRITEKMAKAIREWYCRECREKKKSRERDGNERDSSEPRDEGGGRKR

SEQ ID NO: 20195 - protein, 70 aa, Synthetic construct
RKPDINCFMIGCDNCNEWFHGDCIRITEKMAKAIREWYCRECREKDPKLERDGNERDSSEPRDEGGGRKR

SEQ ID NO: 20196 - protein, 70 aa, Synthetic construct
RKPDINCFMIGCDNCNEWFHGDCIRITEKMAKAIREWYCRECREKDPKLEIRYRHRDSSEPRDEGGGRKR

SEQ ID NO: 20197 - protein, 70 aa, Synthetic construct
RKPDINCFMIGCDNCNEWFHGDCIRITEKMAKAIREWYCRECREKDPKLEIRYRHKKSREPRDEGGGRKR

SEQ ID NO: 20198 - protein, 70 aa, Synthetic construct
RKPDINCFMIGCDNCNEWFHGDCIRITEKMAKAIREWYCRECREKDPKLEIRYRHKKSRERDGNEGGRKR

SEQ ID NO: 20199 - protein, 70 aa, Synthetic construct
RKPDINCFMIGCDNCNEWFHGDCIRITEKMAKAIREWYCRECREKDPKLEIRYRHKKSRERDGNERDSSE

SEQ ID NO: 20200 - protein, 70 aa, Synthetic construct
DTPRDFPDSFQAGSPGHLGVIRDFSIESLLRENLYPKANIPDRRPSLSPFAPDFFPHLWPGDFGAFAQLP

SEQ ID NO: 20201 - protein, 70 aa, Synthetic construct
TDHLTFPDSFQAGSPGHLGVIRDFSIESLLRENLYPKANIPDRRPSLSPFAPDFFPHLWPGDFGAFAQLP

SEQ ID NO: 20202 - protein, 70 aa, Synthetic construct
TDHLTEKAYSQAGSPGHLGVIRDFSIESLLRENLYPKANIPDRRPSLSPFAPDFFPHLWPGDFGAFAQLP

SEQ ID NO: 20203 - protein, 70 aa, Synthetic construct
TDHLTEKAYSDTPRDGHLGVIRDFSIESLLRENLYPKANIPDRRPSLSPFAPDFFPHLWPGDFGAFAQLP

SEQ ID NO: 20204 - protein, 70 aa, Synthetic construct
TDHLTEKAYSDTPRDFPDSFQAGSPGHLGVIRDFSIESLLRENLYSLSPFAPDFFPHLWPGDFGAFAQLP

SEQ ID NO: 20205 - protein, 70 aa, Synthetic construct
TDHLTEKAYSDTPRDFPDSFQAGSPGHLGVIRDFSIESLLRENLYPKANIAPDFFPHLWPGDFGAFAQLP

SEQ ID NO: 20206 - protein, 70 aa, Synthetic construct
PPTKGGGLGPCGKCQEGLEGGASGASEPSEEVNKASGPRACPPSHHTKLKKTWLTRHSEQFECPRGCPEV

SEQ ID NO: 20207 - protein, 70 aa, Synthetic construct
VTQRGGGLGPCGKCQEGLEGGASGASEPSEEVNKASGPRACPPSHHTKLKKTWLTRHSEQFECPRGCPEV

SEQ ID NO: 20208 - protein, 70 aa, Synthetic construct
VTQRGCCSSYCGKCQEGLEGGASGASEPSEEVNKASGPRACPPSHHTKLKKTWLTRHSEQFECPRGCPEV

SEQ ID NO: 20209 - protein, 70 aa, Synthetic construct
VTQRGCCSSYPPTKGEGLEGGASGASEPSEEVNKASGPRACPPSHHTKLKKTWLTRHSEQFECPRGCPEV

SEQ ID NO: 20210 - protein, 70 aa, Synthetic construct
VTQRGCCSSYPPTKGGGLGPGASGASEPSEEVNKASGPRACPPSHHTKLKKTWLTRHSEQFECPRGCPEV

SEQ ID NO: 20211 - protein, 70 aa, Synthetic construct
VTQRGCCSSYPPTKGGGLGPCGKCQSEPSEEVNKASGPRACPPSHHTKLKKTWLTRHSEQFECPRGCPEV

SEQ ID NO: 20212 - protein, 70 aa, Synthetic construct
VTQRGCCSSYPPTKGGGLGPCGKCQEGLEGEVNKASGPRACPPSHHTKLKKTWLTRHSEQFECPRGCPEV

SEQ ID NO: 20213 - protein, 70 aa, Synthetic construct
VTQRGCCSSYPPTKGGGLGPCGKCQEGLEGGASGASGPRACPPSHHTKLKKTWLTRHSEQFECPRGCPEV

SEQ ID NO: 20214 - protein, 70 aa, Synthetic construct
VTQRGCCSSYPPTKGGGLGPCGKCQEGLEGGASGASEPSECPPSHHTKLKKTWLTRHSEQFECPRGCPEV

SEQ ID NO: 20215 - protein, 70 aa, Synthetic construct
VTQRGCCSSYPPTKGGGLGPCGKCQEGLEGGASGASEPSEEVNKAHTKLKKTWLTRHSEQFECPRGCPEV

SEQ ID NO: 20216 - protein, 70 aa, Synthetic construct
VTQRGCCSSYPPTKGGGLGPCGKCQEGLEGGASGASEPSEEVNKASGPRACPPSHHTKLKKTWLTRHSEQ

SEQ ID NO: 20217 - protein, 70 aa, Synthetic construct
EPQKNIQETKQVDDEDAELIFVGVEHVNEDAELIFVGVTSNSKPVVSNILNRVTPGSWSRRKKYDHLRKD

SEQ ID NO: 20218 - protein, 70 aa, Synthetic construct
EQSCEIQETKQVDDEDAELIFVGVEHVNEDAELIFVGVTSNSKPVVSNILNRVTPGSWSRRKKYDHLRKD

SEQ ID NO: 20219 - protein, 70 aa, Synthetic construct
EQSCEEEKEPQVDDEDAELIFVGVEHVNEDAELIFVGVTSNSKPVVSNILNRVTPGSWSRRKKYDHLRKD

SEQ ID NO: 20220 - protein, 70 aa, Synthetic construct
EQSCEEEKEPEPQKNDAELIFVGVEHVNEDAELIFVGVTSNSKPVVSNILNRVTPGSWSRRKKYDHLRKD

SEQ ID NO: 20221 - protein, 70 aa, Synthetic construct
EQSCEEEKEPEPQKNIQETKFVGVEHVNEDAELIFVGVTSNSKPVVSNILNRVTPGSWSRRKKYDHLRKD

SEQ ID NO: 20222 - protein, 70 aa, Synthetic construct
EQSCEEEKEPEPQKNIQETKQVDDEHVNEDAELIFVGVTSNSKPVVSNILNRVTPGSWSRRKKYDHLRKD

SEQ ID NO: 20223 - protein, 70 aa, Synthetic construct
EQSCEEEKEPEPQKNIQETKQVDDEDAELIAELIFVGVTSNSKPVVSNILNRVTPGSWSRRKKYDHLRKD

SEQ ID NO: 20224 - protein, 70 aa, Synthetic construct
EQSCEEEKEPEPQKNIQETKQVDDEDAELIFVGVEVGVTSNSKPVVSNILNRVTPGSWSRRKKYDHLRKD

SEQ ID NO: 20225 - protein, 70 aa, Synthetic construct
EQSCEEEKEPEPQKNIQETKQVDDEDAELIFVGVEHVNEDNSKPVVSNILNRVTPGSWSRRKKYDHLRKD

SEQ ID NO: 20226 - protein, 70 aa, Synthetic construct
EQSCEEEKEPEPQKNIQETKQVDDEDAELIFVGVEHVNEDAELIFVSNILNRVTPGSWSRRKKYDHLRKD

SEQ ID NO: 20227 - protein, 70 aa, Synthetic construct
EQSCEEEKEPEPQKNIQETKQVDDEDAELIFVGVEHVNEDAELIFVGVTSNRVTPGSWSRRKKYDHLRKD

SEQ ID NO: 20228 - protein, 70 aa, Synthetic construct
EQSCEEEKEPEPQKNIQETKQVDDEDAELIFVGVEHVNEDAELIFVGVTSNSKPVGSWSRRKKYDHLRKD

SEQ ID NO: 20229 - protein, 70 aa, Synthetic construct
EQSCEEEKEPEPQKNIQETKQVDDEDAELIFVGVEHVNEDAELIFVGVTSNSKPVVSNILRKKYDHLRKD

SEQ ID NO: 20230 - protein, 70 aa, Synthetic construct
EQSCEEEKEPEPQKNIQETKQVDDEDAELIFVGVEHVNEDAELIFVGVTSNSKPVVSNILNRVTPHLRKD

SEQ ID NO: 20231 - protein, 70 aa, Synthetic construct
EQSCEEEKEPEPQKNIQETKQVDDEDAELIFVGVEHVNEDAELIFVGVTSNSKPVVSNILNRVTPGSWSR

SEQ ID NO: 20232 - protein, 70 aa, Synthetic construct
YQLQVNTLRRYKRHFKLPTRPGLNKAQLVEIVGCHFRSIPVNEKDTLTYFIYSVKNDKNKSDLKVDSGVH

SEQ ID NO: 20233 - protein, 70 aa, Synthetic construct
QDIDTNTLRRYKRHFKLPTRPGLNKAQLVEIVGCHFRSIPVNEKDTLTYFIYSVKNDKNKSDLKVDSGVH

SEQ ID NO: 20234 - protein, 70 aa, Synthetic construct
QDIDTPEVDLYKRHFKLPTRPGLNKAQLVEIVGCHFRSIPVNEKDTLTYFIYSVKNDKNKSDLKVDSGVH

SEQ ID NO: 20235 - protein, 70 aa, Synthetic construct
QDIDTPEVDLYQLQVNTLRRPGLNKAQLVEIVGCHFRSIPVNEKDTLTYFIYSVKNDKNKSDLKVDSGVH

SEQ ID NO: 20236 - protein, 70 aa, Synthetic construct
QDIDTPEVDLYQLQVNTLRRYKRHFKLPTRPGLNKAQLVEVNEKDTLTYFIYSVKNDKNKSDLKVDSGVH

SEQ ID NO: 20237 - protein, 70 aa, Synthetic construct
QDIDTPEVDLYQLQVNTLRRYKRHFKLPTRPGLNKAQLVEIVGCHTLTYFIYSVKNDKNKSDLKVDSGVH

SEQ ID NO: 20238 - protein, 70 aa, Synthetic construct
QDIDTPEVDLYQLQVNTLRRYKRHFKLPTRPGLNKAQLVEIVGCHFRSIPIYSVKNDKNKSDLKVDSGVH

SEQ ID NO: 20239 - protein, 70 aa, Synthetic construct
QDIDTPEVDLYQLQVNTLRRYKRHFKLPTRPGLNKAQLVEIVGCHFRSIPVNEKDTLTYFIYSVKDSGVH

SEQ ID NO: 20240 - protein, 70 aa, Synthetic construct
QDIDTPEVDLYQLQVNTLRRYKRHFKLPTRPGLNKAQLVEIVGCHFRSIPVNEKDTLTYFIYSVKNDKNK

SEQ ID NO: 20241 - protein, 70 aa, Synthetic construct
GVLDLKAAADTLAVRQKRRIDLIEKKSKNSIQWKGVGAGCNTKEVIDRLRYLKAEIEDLELKERELDQQK

SEQ ID NO: 20242 - protein, 70 aa, Synthetic construct
GVLDLKAAADTLAVRQKRRIYDITNVLEGIDLIEKKSKNSNTKEVIDRLRYLKAEIEDLELKERELDQQK

SEQ ID NO: 20243 - protein, 70 aa, Synthetic construct
GVLDLKAAADTLAVRQKRRIYDITNVLEGIDLIEKKSKNSIQWKGVGAGCNTKEVIDRLRYLKAEIEDLE

SEQ ID NO: 20244 - protein, 70 aa, Synthetic construct
DDLYAEQMEREMRHKLKTAFKNFIEKVEALTKEELEFEVPFRDLGFNGAPYRSTCLLQPTSSALVNATEW

SEQ ID NO: 20245 - protein, 70 aa, Synthetic construct
LGKHQEQMEREMRHKLKTAFKNFIEKVEALTKEELEFEVPFRDLGFNGAPYRSTCLLQPTSSALVNATEW

SEQ ID NO: 20246 - protein, 70 aa, Synthetic construct
LGKHQHMHDRDDLYAEQMEREMRHKLKTAFKNFIEKVEALTKEELEFEVPYRSTCLLQPTSSALVNATEW

SEQ ID NO: 20247 - protein, 70 aa, Synthetic construct
LGKHQHMHDRDDLYAEQMEREMRHKLKTAFKNFIEKVEALTKEELEFEVPFRDLGLLQPTSSALVNATEW

SEQ ID NO: 20248 - protein, 70 aa, Synthetic construct
LGKHQHMHDRDDLYAEQMEREMRHKLKTAFKNFIEKVEALTKEELEFEVPFRDLGFNGAPSSALVNATEW

SEQ ID NO: 20249 - protein, 70 aa, Synthetic construct
LGKHQHMHDRDDLYAEQMEREMRHKLKTAFKNFIEKVEALTKEELEFEVPFRDLGFNGAPYRSTCNATEW

SEQ ID NO: 20250 - protein, 70 aa, Synthetic construct
LGKHQHMHDRDDLYAEQMEREMRHKLKTAFKNFIEKVEALTKEELEFEVPFRDLGFNGAPYRSTCLLQPT

SEQ ID NO: 20251 - protein, 70 aa, Synthetic construct
DVAIEFSQEEWKCLDPAQRTLYRDVMLENYRNLVSLDISSKCTMKEFLSTAQGNREVFHAGTLQIHESHH

SEQ ID NO: 20252 - protein, 70 aa, Synthetic construct
AFSQGLLTFRDVAIEFSQEEWKCLDPAQRTLYRDVMLENYKCTMKEFLSTAQGNREVFHAGTLQIHESHH

SEQ ID NO: 20253 - protein, 70 aa, Synthetic construct
AFSQGLLTFRDVAIEFSQEEWKCLDPAQRTLYRDVMLENYRNLVSEFLSTAQGNREVFHAGTLQIHESHH

SEQ ID NO: 20254 - protein, 70 aa, Synthetic construct
AFSQGLLTFRDVAIEFSQEEWKCLDPAQRTLYRDVMLENYRNLVSLDISSAQGNREVFHAGTLQIHESHH

SEQ ID NO: 20255 - protein, 70 aa, Synthetic construct
AFSQGLLTFRDVAIEFSQEEWKCLDPAQRTLYRDVMLENYRNLVSLDISSKCTMKEVFHAGTLQIHESHH

SEQ ID NO: 20256 - protein, 70 aa, Synthetic construct
AFSQGLLTFRDVAIEFSQEEWKCLDPAQRTLYRDVMLENYRNLVSLDISSKCTMKEFLSTGTLQIHESHH

SEQ ID NO: 20257 - protein, 70 aa, Synthetic construct
AFSQGLLTFRDVAIEFSQEEWKCLDPAQRTLYRDVMLENYRNLVSLDISSKCTMKEFLSTAQGNRHESHH

SEQ ID NO: 20258 - protein, 70 aa, Synthetic construct
AFSQGLLTFRDVAIEFSQEEWKCLDPAQRTLYRDVMLENYRNLVSLDISSKCTMKEFLSTAQGNREVFHA

SEQ ID NO: 20259 - protein, 70 aa, Synthetic construct
LARPQAPSSSAFRCPYCKGKFRTSAERERHLHILHRPWKCGLCSFGSSQEEELLHHSLTAHGAPEPPQPQ

SEQ ID NO: 20260 - protein, 70 aa, Synthetic construct
LARPQAPSSSAFRCPYCKGKFRTSAERERHLHILHRPWKCGLCSFGSSQEEELLHHSLTAHGAPERPLAA

SEQ ID NO: 20261 - protein, 70 aa, Synthetic construct
STLPDTDHMVKFVNGQMLYSCVVCKRSYVTLSSLRRHANVHSWRRTYPCHYCNKVFALAEYRTRHEIWHT

SEQ ID NO: 20262 - protein, 70 aa, Synthetic construct
NRIGETDHMVKFVNGQMLYSCVVCKRSYVTLSSLRRHANVHSWRRTYPCHYCNKVFALAEYRTRHEIWHT

SEQ ID NO: 20263 - protein, 70 aa, Synthetic construct
NRIGEFSSTGKFVNGQMLYSCVVCKRSYVTLSSLRRHANVHSWRRTYPCHYCNKVFALAEYRTRHEIWHT

SEQ ID NO: 20264 - protein, 70 aa, Synthetic construct
NRIGEFSSTGSTLPDQMLYSCVVCKRSYVTLSSLRRHANVHSWRRTYPCHYCNKVFALAEYRTRHEIWHT

SEQ ID NO: 20265 - protein, 70 aa, Synthetic construct
NRIGEFSSTGSTLPDTDHMVKFVNGQMLYSCVVCKRSYVTHSWRRTYPCHYCNKVFALAEYRTRHEIWHT

SEQ ID NO: 20266 - protein, 70 aa, Synthetic construct
NRIGEFSSTGSTLPDTDHMVKFVNGQMLYSCVVCKRSYVTLSSLRRHANVYCNKVFALAEYRTRHEIWHT

SEQ ID NO: 20267 - protein, 70 aa, Synthetic construct
NRIGEFSSTGSTLPDTDHMVKFVNGQMLYSCVVCKRSYVTLSSLRRHANVHSWRRFALAEYRTRHEIWHT

SEQ ID NO: 20268 - protein, 70 aa, Synthetic construct
NRIGEFSSTGSTLPDTDHMVKFVNGQMLYSCVVCKRSYVTLSSLRRHANVHSWRRTYPCHYRTRHEIWHT

SEQ ID NO: 20269 - protein, 70 aa, Synthetic construct
NRIGEFSSTGSTLPDTDHMVKFVNGQMLYSCVVCKRSYVTLSSLRRHANVHSWRRTYPCHYCNKVEIWHT

SEQ ID NO: 20270 - protein, 70 aa, Synthetic construct
NRIGEFSSTGSTLPDTDHMVKFVNGQMLYSCVVCKRSYVTLSSLRRHANVHSWRRTYPCHYCNKVFALAE

SEQ ID NO: 20271 - protein, 70 aa, Synthetic construct
SAPSVIVHSSQFSSVTSSNHRAFSDPAVSQSLKDDSKPEPDKVGRFASRPKSIKEKKKTTSHTRGEIPEE

SEQ ID NO: 20272 - protein, 70 aa, Synthetic construct
SAPSVIVHSSQFSSVIMHSNRAFSDPAVSQSLKDDSKPEPDKVGRFASRPKSIKEKKKTTSHTRGEIPEE

SEQ ID NO: 20273 - protein, 70 aa, Synthetic construct
SAPSVIVHSSQFSSVIMHSNAIAAMPAVSQSLKDDSKPEPDKVGRFASRPKSIKEKKKTTSHTRGEIPEE

SEQ ID NO: 20274 - protein, 70 aa, Synthetic construct
SAPSVIVHSSQFSSVIMHSNAIAAMTSSNHSLKDDSKPEPDKVGRFASRPKSIKEKKKTTSHTRGEIPEE

SEQ ID NO: 20275 - protein, 70 aa, Synthetic construct
SAPSVIVHSSQFSSVIMHSNAIAAMTSSNHRAFSDSKPEPDKVGRFASRPKSIKEKKKTTSHTRGEIPEE

SEQ ID NO: 20276 - protein, 70 aa, Synthetic construct
SAPSVIVHSSQFSSVIMHSNAIAAMTSSNHRAFSDPAVSQDKVGRFASRPKSIKEKKKTTSHTRGEIPEE

SEQ ID NO: 20277 - protein, 70 aa, Synthetic construct
SAPSVIVHSSQFSSVIMHSNAIAAMTSSNHRAFSDPAVSQSLKDDFASRPKSIKEKKKTTSHTRGEIPEE

SEQ ID NO: 20278 - protein, 70 aa, Synthetic construct
SAPSVIVHSSQFSSVIMHSNAIAAMTSSNHRAFSDPAVSQSLKDDSKPEPKSIKEKKKTTSHTRGEIPEE

SEQ ID NO: 20279 - protein, 70 aa, Synthetic construct
SAPSVIVHSSQFSSVIMHSNAIAAMTSSNHRAFSDPAVSQSLKDDSKPEPDKVGRKKKTTSHTRGEIPEE

SEQ ID NO: 20280 - protein, 70 aa, Synthetic construct
SAPSVIVHSSQFSSVIMHSNAIAAMTSSNHRAFSDPAVSQSLKDDSKPEPDKVGRFASRPSHTRGEIPEE

SEQ ID NO: 20281 - protein, 70 aa, Synthetic construct
SAPSVIVHSSQFSSVIMHSNAIAAMTSSNHRAFSDPAVSQSLKDDSKPEPDKVGRFASRPKSIKEEIPEE

SEQ ID NO: 20282 - protein, 70 aa, Synthetic construct
SAPSVIVHSSQFSSVIMHSNAIAAMTSSNHRAFSDPAVSQSLKDDSKPEPDKVGRFASRPKSIKEKKKTT

SEQ ID NO: 20283 - protein, 70 aa, Synthetic construct
AANAARERSRVQTLRHAFLELQRTLPSVPPDTKLSKLDVLLLATTYIAHLTRSLQDDAEAPADAGLGALR

SEQ ID NO: 20284 - protein, 70 aa, Synthetic construct
GSRSGRERSRVQTLRHAFLELQRTLPSVPPDTKLSKLDVLLLATTYIAHLTRSLQDDAEAPADAGLGALR

SEQ ID NO: 20285 - protein, 70 aa, Synthetic construct
GSRSGSGRPAVQTLRHAFLELQRTLPSVPPDTKLSKLDVLLLATTYIAHLTRSLQDDAEAPADAGLGALR

SEQ ID NO: 20286 - protein, 70 aa, Synthetic construct
GSRSGSGRPAAANAAHAFLELQRTLPSVPPDTKLSKLDVLLLATTYIAHLTRSLQDDAEAPADAGLGALR

SEQ ID NO: 20287 - protein, 70 aa, Synthetic construct
GSRSGSGRPAAANAARERSRVQTLRHAFLELQRTLPSVPPDTKLSKLDVLLLATTYIAHLTRSLQDDAEA

SEQ ID NO: 20288 - protein, 70 aa, Synthetic construct
HSPQQLAEEATRKRELRLMKNREAAKECRRRKKEYVKCLESRVAVLEVQNKKLIEELETLKDICSPKTDY

SEQ ID NO: 20289 - protein, 70 aa, Synthetic construct
VVMAALAEEATRKRELRLMKNREAAKECRRRKKEYVKCLESRVAVLEVQNKKLIEELETLKDICSPKTDY

SEQ ID NO: 20290 - protein, 70 aa, Synthetic construct
VVMAASPGSLTRKRELRLMKNREAAKECRRRKKEYVKCLESRVAVLEVQNKKLIEELETLKDICSPKTDY

SEQ ID NO: 20291 - protein, 70 aa, Synthetic construct
VVMAASPGSLHSPQQLAEEATRKRELRLMKNREAAVKCLESRVAVLEVQNKKLIEELETLKDICSPKTDY

SEQ ID NO: 20292 - protein, 70 aa, Synthetic construct
VVMAASPGSLHSPQQLAEEATRKRELRLMKNREAAKECRRRKKEYVKCLESRVAVLEVQNKKLIEELETL

SEQ ID NO: 20293 - protein, 70 aa, Synthetic construct
GYARLRDHLPRELADKRLSKVETLRAAIDYIKHLQELLERQAWGLEGAAGAVPQRRAECNSDGESKASSA

SEQ ID NO: 20294 - protein, 70 aa, Synthetic construct
ERQRVRDHLPRELADKRLSKVETLRAAIDYIKHLQELLERQAWGLEGAAGAVPQRRAECNSDGESKASSA

SEQ ID NO: 20295 - protein, 70 aa, Synthetic construct
ERQRVRCVNERELADKRLSKVETLRAAIDYIKHLQELLERQAWGLEGAAGAVPQRRAECNSDGESKASSA

SEQ ID NO: 20296 - protein, 70 aa, Synthetic construct
ERQRVRCVNEGYARLRDHLPVETLRAAIDYIKHLQELLERQAWGLEGAAGAVPQRRAECNSDGESKASSA

SEQ ID NO: 20297 - protein, 70 aa, Synthetic construct
ERQRVRCVNEGYARLRDHLPRELADAAIDYIKHLQELLERQAWGLEGAAGAVPQRRAECNSDGESKASSA

SEQ ID NO: 20298 - protein, 70 aa, Synthetic construct
ERQRVRCVNEGYARLRDHLPRELADKRLSKVETLRELLERQAWGLEGAAGAVPQRRAECNSDGESKASSA

SEQ ID NO: 20299 - protein, 70 aa, Synthetic construct
ERQRVRCVNEGYARLRDHLPRELADKRLSKVETLRAAIDYIKHLQELLERAVPQRRAECNSDGESKASSA

SEQ ID NO: 20300 - protein, 70 aa, Synthetic construct
ERQRVRCVNEGYARLRDHLPRELADKRLSKVETLRAAIDYIKHLQELLERQAWGLRAECNSDGESKASSA

SEQ ID NO: 20301 - protein, 70 aa, Synthetic construct
ERQRVRCVNEGYARLRDHLPRELADKRLSKVETLRAAIDYIKHLQELLERQAWGLEGAAGSDGESKASSA

SEQ ID NO: 20302 - protein, 70 aa, Synthetic construct
ERQRVRCVNEGYARLRDHLPRELADKRLSKVETLRAAIDYIKHLQELLERQAWGLEGAAGAVPQRKASSA

SEQ ID NO: 20303 - protein, 70 aa, Synthetic construct
ERQRVRCVNEGYARLRDHLPRELADKRLSKVETLRAAIDYIKHLQELLERQAWGLEGAAGAVPQRRAECN

SEQ ID NO: 20304 - protein, 70 aa, Synthetic construct
EESDQALDLSLKSGPLQTPLCSQRQPGAQPLVKDERDSLSEQEESSSSRSPHSPPKPPPVPAAKGLVVGL

SEQ ID NO: 20305 - protein, 70 aa, Synthetic construct
EESDQALDLSLKSGPRQERVCSQRQPGAQPLVKDERDSLSEQEESSSSRSPHSPPKPPPVPAAKGLVVGL

SEQ ID NO: 20306 - protein, 70 aa, Synthetic construct
EESDQALDLSLKSGPRQERVHPPCVPGAQPLVKDERDSLSEQEESSSSRSPHSPPKPPPVPAAKGLVVGL

SEQ ID NO: 20307 - protein, 70 aa, Synthetic construct
EESDQALDLSLKSGPRQERVHPPCVLQTPLLVKDERDSLSEQEESSSSRSPHSPPKPPPVPAAKGLVVGL

SEQ ID NO: 20308 - protein, 70 aa, Synthetic construct
EESDQALDLSLKSGPRQERVHPPCVLQTPLCSQRQPGAQPLVKDESSSRSPHSPPKPPPVPAAKGLVVGL

SEQ ID NO: 20309 - protein, 70 aa, Synthetic construct
EESDQALDLSLKSGPRQERVHPPCVLQTPLCSQRQPGAQPLVKDERDSLSPHSPPKPPPVPAAKGLVVGL

SEQ ID NO: 20310 - protein, 70 aa, Synthetic construct
EESDQALDLSLKSGPRQERVHPPCVLQTPLCSQRQPGAQPLVKDERDSLSEQEESKPPPVPAAKGLVVGL

SEQ ID NO: 20311 - protein, 70 aa, Synthetic construct
EESDQALDLSLKSGPRQERVHPPCVLQTPLCSQRQPGAQPLVKDERDSLSEQEESSSSRSPAAKGLVVGL

SEQ ID NO: 20312 - protein, 70 aa, Synthetic construct
EESDQALDLSLKSGPRQERVHPPCVLQTPLCSQRQPGAQPLVKDERDSLSEQEESSSSRSPHSPPLVVGL

SEQ ID NO: 20313 - protein, 70 aa, Synthetic construct
EESDQALDLSLKSGPRQERVHPPCVLQTPLCSQRQPGAQPLVKDERDSLSEQEESSSSRSPHSPPKPPPV

SEQ ID NO: 20314 - protein, 70 aa, Synthetic construct
DRALAHNLLVKAEPKSPRDALKVGGPSAECPFDLTTKPKDVKPILPMPKGPSAPASGEEQPLDLSIGSRA

SEQ ID NO: 20315 - protein, 70 aa, Synthetic construct
NFPHSHNLLVKAEPKSPRDALKVGGPSAECPFDLTTKPKDVKPILPMPKGPSAPASGEEQPLDLSIGSRA

SEQ ID NO: 20316 - protein, 70 aa, Synthetic construct
NFPHSLYPFTKAEPKSPRDALKVGGPSAECPFDLTTKPKDVKPILPMPKGPSAPASGEEQPLDLSIGSRA

SEQ ID NO: 20317 - protein, 70 aa, Synthetic construct
NFPHSLYPFTDRALASPRDALKVGGPSAECPFDLTTKPKDVKPILPMPKGPSAPASGEEQPLDLSIGSRA

SEQ ID NO: 20318 - protein, 70 aa, Synthetic construct
NFPHSLYPFTDRALAHNLLVLKVGGPSAECPFDLTTKPKDVKPILPMPKGPSAPASGEEQPLDLSIGSRA

SEQ ID NO: 20319 - protein, 70 aa, Synthetic construct
NFPHSLYPFTDRALAHNLLVKAEPKPSAECPFDLTTKPKDVKPILPMPKGPSAPASGEEQPLDLSIGSRA

SEQ ID NO: 20320 - protein, 70 aa, Synthetic construct
NFPHSLYPFTDRALAHNLLVKAEPKSPRDAPFDLTTKPKDVKPILPMPKGPSAPASGEEQPLDLSIGSRA

SEQ ID NO: 20321 - protein, 70 aa, Synthetic construct
NFPHSLYPFTDRALAHNLLVKAEPKSPRDALKVGGTKPKDVKPILPMPKGPSAPASGEEQPLDLSIGSRA

SEQ ID NO: 20322 - protein, 70 aa, Synthetic construct
NFPHSLYPFTDRALAHNLLVKAEPKSPRDALKVGGPSAECVKPILPMPKGPSAPASGEEQPLDLSIGSRA

SEQ ID NO: 20323 - protein, 70 aa, Synthetic construct
NFPHSLYPFTDRALAHNLLVKAEPKSPRDALKVGGPSAECPFDLTPMPKGPSAPASGEEQPLDLSIGSRA

SEQ ID NO: 20324 - protein, 70 aa, Synthetic construct
NFPHSLYPFTDRALAHNLLVKAEPKSPRDALKVGGPSAECPFDLTTKPKDPSAPASGEEQPLDLSIGSRA

SEQ ID NO: 20325 - protein, 70 aa, Synthetic construct
NFPHSLYPFTDRALAHNLLVKAEPKSPRDALKVGGPSAECPFDLTTKPKDVKPILSGEEQPLDLSIGSRA

SEQ ID NO: 20326 - protein, 70 aa, Synthetic construct
NFPHSLYPFTDRALAHNLLVKAEPKSPRDALKVGGPSAECPFDLTTKPKDVKPILPMPKGPLDLSIGSRA

SEQ ID NO: 20327 - protein, 70 aa, Synthetic construct
NFPHSLYPFTDRALAHNLLVKAEPKSPRDALKVGGPSAECPFDLTTKPKDVKPILPMPKGPSAPAIGSRA

SEQ ID NO: 20328 - protein, 70 aa, Synthetic construct
NFPHSLYPFTDRALAHNLLVKAEPKSPRDALKVGGPSAECPFDLTTKPKDVKPILPMPKGPSAPASGEEQ

SEQ ID NO: 20329 - protein, 70 aa, Synthetic construct
VKPILPMPKGPSAPASGEEQPLDLSIGSRARASQNGGGREPRKNHVYGERKLGAGEGLPQVCPARMPQQP

SEQ ID NO: 20330 - protein, 70 aa, Synthetic construct
PFDLTTKPKDVKPILSGEEQPLDLSIGSRARASQNGGGREPRKNHVYGERKLGAGEGLPQVCPARMPQQP

SEQ ID NO: 20331 - protein, 70 aa, Synthetic construct
PFDLTTKPKDVKPILPMPKGPLDLSIGSRARASQNGGGREPRKNHVYGERKLGAGEGLPQVCPARMPQQP

SEQ ID NO: 20332 - protein, 70 aa, Synthetic construct
PFDLTTKPKDVKPILPMPKGPSAPASGEEQPLDLSGGGREPRKNHVYGERKLGAGEGLPQVCPARMPQQP

SEQ ID NO: 20333 - protein, 70 aa, Synthetic construct
PFDLTTKPKDVKPILPMPKGPSAPASGEEQPLDLSIGSRAPRKNHVYGERKLGAGEGLPQVCPARMPQQP

SEQ ID NO: 20334 - protein, 70 aa, Synthetic construct
PFDLTTKPKDVKPILPMPKGPSAPASGEEQPLDLSIGSRARASQNVYGERKLGAGEGLPQVCPARMPQQP

SEQ ID NO: 20335 - protein, 70 aa, Synthetic construct
PFDLTTKPKDVKPILPMPKGPSAPASGEEQPLDLSIGSRARASQNGGGREKLGAGEGLPQVCPARMPQQP

SEQ ID NO: 20336 - protein, 70 aa, Synthetic construct
PFDLTTKPKDVKPILPMPKGPSAPASGEEQPLDLSIGSRARASQNGGGREPRKNHEGLPQVCPARMPQQP

SEQ ID NO: 20337 - protein, 70 aa, Synthetic construct
PFDLTTKPKDVKPILPMPKGPSAPASGEEQPLDLSIGSRARASQNGGGREPRKNHVYGERVCPARMPQQP

SEQ ID NO: 20338 - protein, 70 aa, Synthetic construct
PFDLTTKPKDVKPILPMPKGPSAPASGEEQPLDLSIGSRARASQNGGGREPRKNHVYGERKLGAGMPQQP

SEQ ID NO: 20339 - protein, 70 aa, Synthetic construct
PFDLTTKPKDVKPILPMPKGPSAPASGEEQPLDLSIGSRARASQNGGGREPRKNHVYGERKLGAGEGLPQ

SEQ ID NO: 20340 - protein, 70 aa, Synthetic construct
PFPSYGHYRNSLATVEEDFQPFRQLEAAASAAPAMPPFPFRMAPPLLSPGLGLQREPLYDLPWYSKLPPW

SEQ ID NO: 20341 - protein, 70 aa, Synthetic construct
SPQNLAAYYTSLATVEEDFQPFRQLEAAASAAPAMPPFPFRMAPPLLSPGLGLQREPLYDLPWYSKLPPW

SEQ ID NO: 20342 - protein, 70 aa, Synthetic construct
SPQNLAAYYTPFPSYEEDFQPFRQLEAAASAAPAMPPFPFRMAPPLLSPGLGLQREPLYDLPWYSKLPPW

SEQ ID NO: 20343 - protein, 70 aa, Synthetic construct
SPQNLAAYYTPFPSYGHYRNSLATVEAAASAAPAMPPFPFRMAPPLLSPGLGLQREPLYDLPWYSKLPPW

SEQ ID NO: 20344 - protein, 70 aa, Synthetic construct
SPQNLAAYYTPFPSYGHYRNSLATVEEDFQAAPAMPPFPFRMAPPLLSPGLGLQREPLYDLPWYSKLPPW

SEQ ID NO: 20345 - protein, 70 aa, Synthetic construct
SPQNLAAYYTPFPSYGHYRNSLATVEEDFQPFRQLPPFPFRMAPPLLSPGLGLQREPLYDLPWYSKLPPW

SEQ ID NO: 20346 - protein, 70 aa, Synthetic construct
SPQNLAAYYTPFPSYGHYRNSLATVEEDFQPFRQLEAAASRMAPPLLSPGLGLQREPLYDLPWYSKLPPW

SEQ ID NO: 20347 - protein, 70 aa, Synthetic construct
SPQNLAAYYTPFPSYGHYRNSLATVEEDFQPFRQLEAAASAAPAMLLSPGLGLQREPLYDLPWYSKLPPW

SEQ ID NO: 20348 - protein, 70 aa, Synthetic construct
SPQNLAAYYTPFPSYGHYRNSLATVEEDFQPFRQLEAAASAAPAMPPFPFLGLQREPLYDLPWYSKLPPW

SEQ ID NO: 20349 - protein, 70 aa, Synthetic construct
SPQNLAAYYTPFPSYGHYRNSLATVEEDFQPFRQLEAAASAAPAMPPFPFRMAPPEPLYDLPWYSKLPPW

SEQ ID NO: 20350 - protein, 70 aa, Synthetic construct
SPQNLAAYYTPFPSYGHYRNSLATVEEDFQPFRQLEAAASAAPAMPPFPFRMAPPLLSPGLPWYSKLPPW

SEQ ID NO: 20351 - protein, 70 aa, Synthetic construct
ASGRLAGRKVFVEIPKKKYTRRLREQQKTAEGDVGDYRCPQDQSPDRVGTEMEQVSKNEGCQAGAELEEL

SEQ ID NO: 20352 - protein, 70 aa, Synthetic construct
VKPPYAGRKVFVEIPKKKYTRRLREQQKTAEGDVGDYRCPQDQSPDRVGTEMEQVSKNEGCQAGAELEEL

SEQ ID NO: 20353 - protein, 70 aa, Synthetic construct
VFGGVNSIKSHIQTSHCEVFHKCPICPMAFKSGPSAHAHLYSQHPSFQTQQAKLIYKCAMCDTVFTHKPL

SEQ ID NO: 20354 - protein, 70 aa, Synthetic construct
VGYRCPSCSVVFGGVHCEVFHKCPICPMAFKSGPSAHAHLYSQHPSFQTQQAKLIYKCAMCDTVFTHKPL

SEQ ID NO: 20355 - protein, 70 aa, Synthetic construct
VGYRCPSCSVVFGGVNSIKSHIQTSHCEVFHKCPICPMAFYSQHPSFQTQQAKLIYKCAMCDTVFTHKPL

SEQ ID NO: 20356 - protein, 70 aa, Synthetic construct
VGYRCPSCSVVFGGVNSIKSHIQTSHCEVFHKCPICPMAFKSGPSAHAHLQAKLIYKCAMCDTVFTHKPL

SEQ ID NO: 20357 - protein, 70 aa, Synthetic construct
LSSHFDQHLLPQRVSVFKCPSCPLLFAQKRTMLEHLKNTHQSGRLEETAGKGAGGALLTPKTEPEELAVS

SEQ ID NO: 20358 - protein, 70 aa, Synthetic construct
CDTVFDQHLLPQRVSVFKCPSCPLLFAQKRTMLEHLKNTHQSGRLEETAGKGAGGALLTPKTEPEELAVS

SEQ ID NO: 20359 - protein, 70 aa, Synthetic construct
CDTVFTHKPLPQRVSVFKCPSCPLLFAQKRTMLEHLKNTHQSGRLEETAGKGAGGALLTPKTEPEELAVS

SEQ ID NO: 20360 - protein, 70 aa, Synthetic construct
CDTVFTHKPLLSSHFVFKCPSCPLLFAQKRTMLEHLKNTHQSGRLEETAGKGAGGALLTPKTEPEELAVS

SEQ ID NO: 20361 - protein, 70 aa, Synthetic construct
CDTVFTHKPLLSSHFDQHLLSCPLLFAQKRTMLEHLKNTHQSGRLEETAGKGAGGALLTPKTEPEELAVS

SEQ ID NO: 20362 - protein, 70 aa, Synthetic construct
CDTVFTHKPLLSSHFDQHLLPQRVSFAQKRTMLEHLKNTHQSGRLEETAGKGAGGALLTPKTEPEELAVS

SEQ ID NO: 20363 - protein, 70 aa, Synthetic construct
CDTVFTHKPLLSSHFDQHLLPQRVSVFKCPTMLEHLKNTHQSGRLEETAGKGAGGALLTPKTEPEELAVS

SEQ ID NO: 20364 - protein, 70 aa, Synthetic construct
CDTVFTHKPLLSSHFDQHLLPQRVSVFKCPSCPLLLKNTHQSGRLEETAGKGAGGALLTPKTEPEELAVS

SEQ ID NO: 20365 - protein, 70 aa, Synthetic construct
CDTVFTHKPLLSSHFDQHLLPQRVSVFKCPSCPLLFAQKRQSGRLEETAGKGAGGALLTPKTEPEELAVS

SEQ ID NO: 20366 - protein, 70 aa, Synthetic construct
CDTVFTHKPLLSSHFDQHLLPQRVSVFKCPSCPLLFAQKRTMLEHEETAGKGAGGALLTPKTEPEELAVS

SEQ ID NO: 20367 - protein, 70 aa, Synthetic construct
CDTVFTHKPLLSSHFDQHLLPQRVSVFKCPSCPLLFAQKRTMLEHLKNTHKGAGGALLTPKTEPEELAVS

SEQ ID NO: 20368 - protein, 70 aa, Synthetic construct
CDTVFTHKPLLSSHFDQHLLPQRVSVFKCPSCPLLFAQKRTMLEHLKNTHQSGRLALLTPKTEPEELAVS

SEQ ID NO: 20369 - protein, 70 aa, Synthetic construct
ELLTFKDVAIEFSPEEWKCLDTSQQNLYRDVMLENYRNLVLVTSLEQRKEPYNLKIHETAARPPAVCSHF

SEQ ID NO: 20370 - protein, 70 aa, Synthetic construct
ELLTFKDVAIEFSPEEWKCLDTSQQNLYRDVMLENYRNLVSLGVSEQRKEPYNLKIHETAARPPAVCSHF

SEQ ID NO: 20371 - protein, 70 aa, Synthetic construct
ELLTFKDVAIEFSPEEWKCLDTSQQNLYRDVMLENYRNLVSLGVSISNPDPYNLKIHETAARPPAVCSHF

SEQ ID NO: 20372 - protein, 70 aa, Synthetic construct
ELLTFKDVAIEFSPEEWKCLDTSQQNLYRDVMLENYRNLVSLGVSISNPDLVTSLIHETAARPPAVCSHF

SEQ ID NO: 20373 - protein, 70 aa, Synthetic construct
ELLTFKDVAIEFSPEEWKCLDTSQQNLYRDVMLENYRNLVSLGVSISNPDLVTSLEQRKEARPPAVCSHF

SEQ ID NO: 20374 - protein, 70 aa, Synthetic construct
ELLTFKDVAIEFSPEEWKCLDTSQQNLYRDVMLENYRNLVSLGVSISNPDLVTSLEQRKEPYNLKVCSHF

SEQ ID NO: 20375 - protein, 70 aa, Synthetic construct
ELLTFKDVAIEFSPEEWKCLDTSQQNLYRDVMLENYRNLVSLGVSISNPDLVTSLEQRKEPYNLKIHETA

SEQ ID NO: 20376 - protein, 70 aa, Synthetic construct
NQLPSSKRMRTAFTSTQLLELEREFASNMYLSRLRRIEIATYLNLSEKQVKIWFQNRRVKHKKEGGGAGG

SEQ ID NO: 20377 - protein, 70 aa, Synthetic construct
NQLPSSKRMRTAFTSTQLLELEREFASNMYLSRLRRIEIATYLNLSEKQVKIWFQNRRVKHKKEGKGSNH

SEQ ID NO: 20378 - protein, 70 aa, Synthetic construct
RNLLFQEPVTFEDVAVYFTQNEWASLHPTQRALYREVMLENYANVTSLYPTAGGFPLDTERTEKVPGALS

SEQ ID NO: 20379 - protein, 70 aa, Synthetic construct
LQTVWQEPVTFEDVAVYFTQNEWASLHPTQRALYREVMLENYANVTSLYPTAGGFPLDTERTEKVPGALS

SEQ ID NO: 20380 - protein, 70 aa, Synthetic construct
LQTVWFQGLGFEDVAVYFTQNEWASLHPTQRALYREVMLENYANVTSLYPTAGGFPLDTERTEKVPGALS

SEQ ID NO: 20381 - protein, 70 aa, Synthetic construct
LQTVWFQGLGRNLLFQEPVTFEDVAVYFTQNEWASLHPTQRALYREVMLETAGGFPLDTERTEKVPGALS

SEQ ID NO: 20382 - protein, 70 aa, Synthetic construct
LQTVWFQGLGRNLLFQEPVTFEDVAVYFTQNEWASLHPTQRALYREVMLENYANVPLDTERTEKVPGALS

SEQ ID NO: 20383 - protein, 70 aa, Synthetic construct
LQTVWFQGLGRNLLFQEPVTFEDVAVYFTQNEWASLHPTQRALYREVMLENYANVTSLYPRTEKVPGALS

SEQ ID NO: 20384 - protein, 70 aa, Synthetic construct
LQTVWFQGLGRNLLFQEPVTFEDVAVYFTQNEWASLHPTQRALYREVMLENYANVTSLYPTAGGFPGALS

SEQ ID NO: 20385 - protein, 70 aa, Synthetic construct
LQTVWFQGLGRNLLFQEPVTFEDVAVYFTQNEWASLHPTQRALYREVMLENYANVTSLYPTAGGFPLDTE

SEQ ID NO: 20386 - protein, 70 aa, Synthetic construct
LYELQRTPQEAITDGLEIVVSPRSLHSELMCPICLDMLKNTMTTKECLHRFCADCIITALRSGNKECPTC

SEQ ID NO: 20387 - protein, 70 aa, Synthetic construct
QPLSKRTPQEAITDGLEIVVSPRSLHSELMCPICLDMLKNTMTTKECLHRFCADCIITALRSGNKECPTC

SEQ ID NO: 20388 - protein, 70 aa, Synthetic construct
QPLSKTWELSAITDGLEIVVSPRSLHSELMCPICLDMLKNTMTTKECLHRFCADCIITALRSGNKECPTC

SEQ ID NO: 20389 - protein, 70 aa, Synthetic construct
QPLSKTWELSLYELQRTPQESPRSLHSELMCPICLDMLKNTMTTKECLHRFCADCIITALRSGNKECPTC

SEQ ID NO: 20390 - protein, 70 aa, Synthetic construct
QPLSKTWELSLYELQRTPQEAITDGHSELMCPICLDMLKNTMTTKECLHRFCADCIITALRSGNKECPTC

SEQ ID NO: 20391 - protein, 70 aa, Synthetic construct
QPLSKTWELSLYELQRTPQEAITDGLEIVVCPICLDMLKNTMTTKECLHRFCADCIITALRSGNKECPTC

SEQ ID NO: 20392 - protein, 70 aa, Synthetic construct
QPLSKTWELSLYELQRTPQEAITDGLEIVVSPRSLHSELMTMTTKECLHRFCADCIITALRSGNKECPTC

SEQ ID NO: 20393 - protein, 70 aa, Synthetic construct
QPLSKTWELSLYELQRTPQEAITDGLEIVVSPRSLHSELMCPICLECLHRFCADCIITALRSGNKECPTC

SEQ ID NO: 20394 - protein, 70 aa, Synthetic construct
QPLSKTWELSLYELQRTPQEAITDGLEIVVSPRSLHSELMCPICLDMLKNFCADCIITALRSGNKECPTC

SEQ ID NO: 20395 - protein, 70 aa, Synthetic construct
IAELQQAVVEELGISMEELRHFIDEELEKMDCVQQRKKQLAELETHVDQLFDDASRAVTNCESLVKDFYS

SEQ ID NO: 20396 - protein, 70 aa, Synthetic construct
WAKCNQLFELLQDLVDHVNDYHVKPEKDAGYCCHWEGCARHGRGFNARYKMLIHIRTHTNEKPHRCPTCS

SEQ ID NO: 20397 - protein, 70 aa, Synthetic construct
LPLPKQLFELLQDLVDHVNDYHVKPEKDAGYCCHWEGCARHGRGFNARYKMLIHIRTHTNEKPHRCPTCS

SEQ ID NO: 20398 - protein, 70 aa, Synthetic construct
LPLPKQLVCRWAKCNQLFELYHVKPEKDAGYCCHWEGCARHGRGFNARYKMLIHIRTHTNEKPHRCPTCS

SEQ ID NO: 20399 - protein, 70 aa, Synthetic construct
LPLPKQLVCRWAKCNQLFELLQDLVDHVNDYCCHWEGCARHGRGFNARYKMLIHIRTHTNEKPHRCPTCS

SEQ ID NO: 20400 - protein, 70 aa, Synthetic construct
LPLPKQLVCRWAKCNQLFELLQDLVDHVNDYHVKPEGCARHGRGFNARYKMLIHIRTHTNEKPHRCPTCS

SEQ ID NO: 20401 - protein, 70 aa, Synthetic construct
LPLPKQLVCRWAKCNQLFELLQDLVDHVNDYHVKPEKDAGHGRGFNARYKMLIHIRTHTNEKPHRCPTCS

SEQ ID NO: 20402 - protein, 70 aa, Synthetic construct
LPLPKQLVCRWAKCNQLFELLQDLVDHVNDYHVKPEKDAGYCCHWNARYKMLIHIRTHTNEKPHRCPTCS

SEQ ID NO: 20403 - protein, 70 aa, Synthetic construct
LPLPKQLVCRWAKCNQLFELLQDLVDHVNDYHVKPEKDAGYCCHWEGCARMLIHIRTHTNEKPHRCPTCS

SEQ ID NO: 20404 - protein, 70 aa, Synthetic construct
LPLPKQLVCRWAKCNQLFELLQDLVDHVNDYHVKPEKDAGYCCHWEGCARHGRGFRTHTNEKPHRCPTCS

SEQ ID NO: 20405 - protein, 70 aa, Synthetic construct
LPLPKQLVCRWAKCNQLFELLQDLVDHVNDYHVKPEKDAGYCCHWEGCARHGRGFNARYKEKPHRCPTCS

SEQ ID NO: 20406 - protein, 70 aa, Synthetic construct
LPLPKQLVCRWAKCNQLFELLQDLVDHVNDYHVKPEKDAGYCCHWEGCARHGRGFNARYKMLIHICPTCS

SEQ ID NO: 20407 - protein, 70 aa, Synthetic construct
LPLPKQLVCRWAKCNQLFELLQDLVDHVNDYHVKPEKDAGYCCHWEGCARHGRGFNARYKMLIHIRTHTN

SEQ ID NO: 20408 - protein, 70 aa, Synthetic construct
LRQAFLALQAALPAVPPDTKLSKLDVLVLAASYIAHLTRTLGHELGLRYLHPLKKWPMRSRLYAGGLGYS

SEQ ID NO: 20409 - protein, 70 aa, Synthetic construct
LRQAFLALQAALPAVPPDTKLSKLDVLVLAASYIAHLTRTLGHELPGPAWHPLKKWPMRSRLYAGGLGYS

SEQ ID NO: 20410 - protein, 70 aa, Synthetic construct
LRQAFLALQAALPAVPPDTKLSKLDVLVLAASYIAHLTRTLGHELPGPAWPPFLRWPMRSRLYAGGLGYS

SEQ ID NO: 20411 - protein, 70 aa, Synthetic construct
LRQAFLALQAALPAVPPDTKLSKLDVLVLAASYIAHLTRTLGHELPGPAWPPFLRGLRYLRLYAGGLGYS

SEQ ID NO: 20412 - protein, 70 aa, Synthetic construct
LRQAFLALQAALPAVPPDTKLSKLDVLVLAASYIAHLTRTLGHELPGPAWPPFLRGLRYLHPLKKGLGYS

SEQ ID NO: 20413 - protein, 70 aa, Synthetic construct
LRQAFLALQAALPAVPPDTKLSKLDVLVLAASYIAHLTRTLGHELPGPAWPPFLRGLRYLHPLKKWPMRS

SEQ ID NO: 20414 - protein, 70 aa, Synthetic construct
KTRTKDKYRVVYTDHQRLELEKEFHYSRYITIRRKAELAATLGLSERQVKIWFQNRRAKERKINKKKLQQ

SEQ ID NO: 20415 - protein, 70 aa, Synthetic construct
PAQQSDKYRVVYTDHQRLELEKEFHYSRYITIRRKAELAATLGLSERQVKIWFQNRRAKERKINKKKLQQ

SEQ ID NO: 20416 - protein, 70 aa, Synthetic construct
LASPKLGATPLPPESTPAPPPPPPPPPPPGVGSGHLNIPLILEELRVLQQRQIHQMQMTEQICRQVLLLG

SEQ ID NO: 20417 - protein, 70 aa, Synthetic construct
TAAGGLGATPLPPESTPAPPPPPPPPPPPGVGSGHLNIPLILEELRVLQQRQIHQMQMTEQICRQVLLLG

SEQ ID NO: 20418 - protein, 70 aa, Synthetic construct
TAAGGGGGLILPPESTPAPPPPPPPPPPPGVGSGHLNIPLILEELRVLQQRQIHQMQMTEQICRQVLLLG

SEQ ID NO: 20419 - protein, 70 aa, Synthetic construct
TAAGGGGGLILASPKTPAPPPPPPPPPPPGVGSGHLNIPLILEELRVLQQRQIHQMQMTEQICRQVLLLG

SEQ ID NO: 20420 - protein, 70 aa, Synthetic construct
TAAGGGGGLILASPKLGATPPPPPPPPPPGVGSGHLNIPLILEELRVLQQRQIHQMQMTEQICRQVLLLG

SEQ ID NO: 20421 - protein, 70 aa, Synthetic construct
TAAGGGGGLILASPKLGATPLPPESPPPPGVGSGHLNIPLILEELRVLQQRQIHQMQMTEQICRQVLLLG

SEQ ID NO: 20422 - protein, 70 aa, Synthetic construct
TAAGGGGGLILASPKLGATPLPPESTPAPPVGSGHLNIPLILEELRVLQQRQIHQMQMTEQICRQVLLLG

SEQ ID NO: 20423 - protein, 70 aa, Synthetic construct
TAAGGGGGLILASPKLGATPLPPESTPAPPPPPPPLNIPLILEELRVLQQRQIHQMQMTEQICRQVLLLG

SEQ ID NO: 20424 - protein, 70 aa, Synthetic construct
SLPSHHGKKMRMARCGHCRGCLRVQDCGSCVNCLDKPKFGGPNTKKQCCVYRKCDKIEARKMERLAKKGR

SEQ ID NO: 20425 - protein, 70 aa, Synthetic construct
PSYPTRATRKRRHWICSACVRCKSCGATPGKNWDVEWSGDYSLCPRCTQLYEKGNYCPICTRCYEDNDYE

SEQ ID NO: 20426 - protein, 70 aa, Synthetic construct
RHAYHRATRKRRHWICSACVRCKSCGATPGKNWDVEWSGDYSLCPRCTQLYEKGNYCPICTRCYEDNDYE

SEQ ID NO: 20427 - protein, 70 aa, Synthetic construct
RHAYHPACLGRRHWICSACVRCKSCGATPGKNWDVEWSGDYSLCPRCTQLYEKGNYCPICTRCYEDNDYE

SEQ ID NO: 20428 - protein, 70 aa, Synthetic construct
RHAYHPACLGPSYPTCSACVRCKSCGATPGKNWDVEWSGDYSLCPRCTQLYEKGNYCPICTRCYEDNDYE

SEQ ID NO: 20429 - protein, 70 aa, Synthetic construct
RHAYHPACLGPSYPTRATRKRRHWIGATPGKNWDVEWSGDYSLCPRCTQLYEKGNYCPICTRCYEDNDYE

SEQ ID NO: 20430 - protein, 70 aa, Synthetic construct
RHAYHPACLGPSYPTRATRKRRHWICSACVKNWDVEWSGDYSLCPRCTQLYEKGNYCPICTRCYEDNDYE

SEQ ID NO: 20431 - protein, 70 aa, Synthetic construct
RHAYHPACLGPSYPTRATRKRRHWICSACVRCKSCEWSGDYSLCPRCTQLYEKGNYCPICTRCYEDNDYE

SEQ ID NO: 20432 - protein, 70 aa, Synthetic construct
RHAYHPACLGPSYPTRATRKRRHWICSACVRCKSCGATPGYSLCPRCTQLYEKGNYCPICTRCYEDNDYE

SEQ ID NO: 20433 - protein, 70 aa, Synthetic construct
RHAYHPACLGPSYPTRATRKRRHWICSACVRCKSCGATPGKNWDVEWSGDYSLCPYCPICTRCYEDNDYE

SEQ ID NO: 20434 - protein, 70 aa, Synthetic construct
RHAYHPACLGPSYPTRATRKRRHWICSACVRCKSCGATPGKNWDVEWSGDYSLCPRCTQLYEKGNDNDYE

SEQ ID NO: 20435 - protein, 70 aa, Synthetic construct
RHAYHPACLGPSYPTRATRKRRHWICSACVRCKSCGATPGKNWDVEWSGDYSLCPRCTQLYEKGNYCPIC

SEQ ID NO: 20436 - protein, 70 aa, Synthetic construct
YSLCPRCTQLYEKGNYCPICTRCYEDNDYESKMMQCAQCDHWVHAKCEGLSDEDYEILSGLPDSVLYTCG

SEQ ID NO: 20437 - protein, 70 aa, Synthetic construct
KNWDVRCTQLYEKGNYCPICTRCYEDNDYESKMMQCAQCDHWVHAKCEGLSDEDYEILSGLPDSVLYTCG

SEQ ID NO: 20438 - protein, 70 aa, Synthetic construct
KNWDVEWSGDYEKGNYCPICTRCYEDNDYESKMMQCAQCDHWVHAKCEGLSDEDYEILSGLPDSVLYTCG

SEQ ID NO: 20439 - protein, 70 aa, Synthetic construct
KNWDVEWSGDYSLCPYCPICTRCYEDNDYESKMMQCAQCDHWVHAKCEGLSDEDYEILSGLPDSVLYTCG

SEQ ID NO: 20440 - protein, 70 aa, Synthetic construct
KNWDVEWSGDYSLCPRCTQLTRCYEDNDYESKMMQCAQCDHWVHAKCEGLSDEDYEILSGLPDSVLYTCG

SEQ ID NO: 20441 - protein, 70 aa, Synthetic construct
KNWDVEWSGDYSLCPRCTQLYEKGNDNDYESKMMQCAQCDHWVHAKCEGLSDEDYEILSGLPDSVLYTCG

SEQ ID NO: 20442 - protein, 70 aa, Synthetic construct
KNWDVEWSGDYSLCPRCTQLYEKGNYCPICSKMMQCAQCDHWVHAKCEGLSDEDYEILSGLPDSVLYTCG

SEQ ID NO: 20443 - protein, 70 aa, Synthetic construct
KNWDVEWSGDYSLCPRCTQLYEKGNYCPICTRCYECAQCDHWVHAKCEGLSDEDYEILSGLPDSVLYTCG

SEQ ID NO: 20444 - protein, 70 aa, Synthetic construct
KNWDVEWSGDYSLCPRCTQLYEKGNYCPICTRCYEDNDYEHWVHAKCEGLSDEDYEILSGLPDSVLYTCG

SEQ ID NO: 20445 - protein, 70 aa, Synthetic construct
KNWDVEWSGDYSLCPRCTQLYEKGNYCPICTRCYEDNDYESKMMQKCEGLSDEDYEILSGLPDSVLYTCG

SEQ ID NO: 20446 - protein, 70 aa, Synthetic construct
KNWDVEWSGDYSLCPRCTQLYEKGNYCPICTRCYEDNDYESKMMQCAQCDSDEDYEILSGLPDSVLYTCG

SEQ ID NO: 20447 - protein, 70 aa, Synthetic construct
KNWDVEWSGDYSLCPRCTQLYEKGNYCPICTRCYEDNDYESKMMQCAQCDHWVHAEILSGLPDSVLYTCG

SEQ ID NO: 20448 - protein, 70 aa, Synthetic construct
KNWDVEWSGDYSLCPRCTQLYEKGNYCPICTRCYEDNDYESKMMQCAQCDHWVHAKCEGLLPDSVLYTCG

SEQ ID NO: 20449 - protein, 70 aa, Synthetic construct
KNWDVEWSGDYSLCPRCTQLYEKGNYCPICTRCYEDNDYESKMMQCAQCDHWVHAKCEGLSDEDYLYTCG

SEQ ID NO: 20450 - protein, 70 aa, Synthetic construct
KNWDVEWSGDYSLCPRCTQLYEKGNYCPICTRCYEDNDYESKMMQCAQCDHWVHAKCEGLSDEDYEILSG

SEQ ID NO: 20451 - protein, 70 aa, Synthetic construct
TQSINSAFAELRECIPNVPADTKLSKIKTLRLATSYIAYLMDLLAKDDQNGEAEAFKAEIKKTDVKEEKR

SEQ ID NO: 20452 - protein, 70 aa, Synthetic construct
GTANRSAFAELRECIPNVPADTKLSKIKTLRLATSYIAYLMDLLAKDDQNGEAEAFKAEIKKTDVKEEKR

SEQ ID NO: 20453 - protein, 70 aa, Synthetic construct
GTANRKERRRLRECIPNVPADTKLSKIKTLRLATSYIAYLMDLLAKDDQNGEAEAFKAEIKKTDVKEEKR

SEQ ID NO: 20454 - protein, 70 aa, Synthetic construct
GTANRKERRRTQSINSAFAELRECIPNVPADTKLSKIKTLRLATSYIAYLMDLLAFKAEIKKTDVKEEKR

SEQ ID NO: 20455 - protein, 70 aa, Synthetic construct
GTANRKERRRTQSINSAFAELRECIPNVPADTKLSKIKTLRLATSYIAYLMDLLAKDDQNKKTDVKEEKR

SEQ ID NO: 20456 - protein, 70 aa, Synthetic construct
GTANRKERRRTQSINSAFAELRECIPNVPADTKLSKIKTLRLATSYIAYLMDLLAKDDQNGEAEAKEEKR

SEQ ID NO: 20457 - protein, 70 aa, Synthetic construct
GTANRKERRRTQSINSAFAELRECIPNVPADTKLSKIKTLRLATSYIAYLMDLLAKDDQNGEAEAFKAEI

SEQ ID NO: 20458 - protein, 70 aa, Synthetic construct
VVRRCGLAPPQHLIRVEGNLRVEYLDDRNTFRHSVVVPYEPPEVGSDCTTIHYNYMCNSSCMGGMNRRPI

SEQ ID NO: 20459 - protein, 70 aa, Synthetic construct
VVRRCPHHERQHLIRVEGNLRVEYLDDRNTFRHSVVVPYEPPEVGSDCTTIHYNYMCNSSCMGGMNRRPI

SEQ ID NO: 20460 - protein, 70 aa, Synthetic construct
VVRRCPHHERCSDSDGLAPPQHLIRVEGNLRVEYLDDRNTFRHSVSDCTTIHYNYMCNSSCMGGMNRRPI

SEQ ID NO: 20461 - protein, 70 aa, Synthetic construct
DGEYFTLQIRGRERFEMFRELNEALELKDAQAGKEPGGSRAHSSHLKSKKGQSTSRHKKLMFKTEGPDSD

SEQ ID NO: 20462 - protein, 70 aa, Synthetic construct
SSPQPTLQIRGRERFEMFRELNEALELKDAQAGKEPGGSRAHSSHLKSKKGQSTSRHKKLMFKTEGPDSD

SEQ ID NO: 20463 - protein, 70 aa, Synthetic construct
SSPQPKKKPLDGEYFTLQIRGRERFEMFRELNEALELKDAAHSSHLKSKKGQSTSRHKKLMFKTEGPDSD

SEQ ID NO: 20464 - protein, 70 aa, Synthetic construct
SSPQPKKKPLDGEYFTLQIRGRERFEMFRELNEALELKDAQAGKELKSKKGQSTSRHKKLMFKTEGPDSD

SEQ ID NO: 20465 - protein, 70 aa, Synthetic construct
SSPQPKKKPLDGEYFTLQIRGRERFEMFRELNEALELKDAQAGKEPGGSRGQSTSRHKKLMFKTEGPDSD

SEQ ID NO: 20466 - protein, 70 aa, Synthetic construct
SSPQPKKKPLDGEYFTLQIRGRERFEMFRELNEALELKDAQAGKEPGGSRAHSSHRHKKLMFKTEGPDSD

SEQ ID NO: 20467 - protein, 70 aa, Synthetic construct
SSPQPKKKPLDGEYFTLQIRGRERFEMFRELNEALELKDAQAGKEPGGSRAHSSHLKSKKMFKTEGPDSD

SEQ ID NO: 20468 - protein, 70 aa, Synthetic construct
SSPQPKKKPLDGEYFTLQIRGRERFEMFRELNEALELKDAQAGKEPGGSRAHSSHLKSKKGQSTSGPDSD

SEQ ID NO: 20469 - protein, 70 aa, Synthetic construct
SSPQPKKKPLDGEYFTLQIRGRERFEMFRELNEALELKDAQAGKEPGGSRAHSSHLKSKKGQSTSRHKKL

SEQ ID NO: 20470 - protein, 70 aa, Synthetic construct
KVKEVEDDDDDEPIFVGEISSSKPAISNILNRVNPSSYSRGLKNGALSRGITAAFKPTSQHYTNPTSNPV

SEQ ID NO: 20471 - protein, 70 aa, Synthetic construct
EEEELEDDDDDEPIFVGEISSSKPAISNILNRVNPSSYSRGLKNGALSRGITAAFKPTSQHYTNPTSNPV

SEQ ID NO: 20472 - protein, 70 aa, Synthetic construct
EEEELEPWQKKVKEVEDDDDDEPIFVGEISSSKPAISNILGLKNGALSRGITAAFKPTSQHYTNPTSNPV

SEQ ID NO: 20473 - protein, 70 aa, Synthetic construct
EEEELEPWQKKVKEVEDDDDDEPIFVGEISSSKPAISNILNRVNPALSRGITAAFKPTSQHYTNPTSNPV

SEQ ID NO: 20474 - protein, 70 aa, Synthetic construct
EEEELEPWQKKVKEVEDDDDDEPIFVGEISSSKPAISNILNRVNPSSYSRITAAFKPTSQHYTNPTSNPV

SEQ ID NO: 20475 - protein, 70 aa, Synthetic construct
EEEELEPWQKKVKEVEDDDDDEPIFVGEISSSKPAISNILNRVNPSSYSRGLKNGKPTSQHYTNPTSNPV

SEQ ID NO: 20476 - protein, 70 aa, Synthetic construct
EEEELEPWQKKVKEVEDDDDDEPIFVGEISSSKPAISNILNRVNPSSYSRGLKNGALSRGHYTNPTSNPV

SEQ ID NO: 20477 - protein, 70 aa, Synthetic construct
EEEELEPWQKKVKEVEDDDDDEPIFVGEISSSKPAISNILNRVNPSSYSRGLKNGALSRGITAAFTSNPV

SEQ ID NO: 20478 - protein, 70 aa, Synthetic construct
RVVSTSGEQMKVYKCEHCRVLFLDHVMYTIHMGCHGFRDPFECNMCGYHSQDRYEFSSHITRGEHRFHMS

SEQ ID NO: 20479 - protein, 70 aa, Synthetic construct
AASENSGEQMKVYKCEHCRVLFLDHVMYTIHMGCHGFRDPFECNMCGYHSQDRYEFSSHITRGEHRFHMS

SEQ ID NO: 20480 - protein, 70 aa, Synthetic construct
AASENSQDALKVYKCEHCRVLFLDHVMYTIHMGCHGFRDPFECNMCGYHSQDRYEFSSHITRGEHRFHMS

SEQ ID NO: 20481 - protein, 70 aa, Synthetic construct
DKARQKQQRKRCPNCDGPLKLIPCRGHGGFPVTNFWRHDGRFIFFQSKGEHDHPKPETKLEAEARRAMKK

SEQ ID NO: 20482 - protein, 70 aa, Synthetic construct
RKIYLKQQRKRCPNCDGPLKLIPCRGHGGFPVTNFWRHDGRFIFFQSKGEHDHPKPETKLEAEARRAMKK

SEQ ID NO: 20483 - protein, 70 aa, Synthetic construct
RKIYLRPAICRCPNCDGPLKLIPCRGHGGFPVTNFWRHDGRFIFFQSKGEHDHPKPETKLEAEARRAMKK

SEQ ID NO: 20484 - protein, 70 aa, Synthetic construct
RKIYLRPAICDKARQKQQRKRCPNCDGPLKPVTNFWRHDGRFIFFQSKGEHDHPKPETKLEAEARRAMKK

SEQ ID NO: 20485 - protein, 70 aa, Synthetic construct
RKIYLRPAICDKARQKQQRKRCPNCDGPLKLIPCRWRHDGRFIFFQSKGEHDHPKPETKLEAEARRAMKK

SEQ ID NO: 20486 - protein, 70 aa, Synthetic construct
RKIYLRPAICDKARQKQQRKRCPNCDGPLKLIPCRGHGGFRFIFFQSKGEHDHPKPETKLEAEARRAMKK

SEQ ID NO: 20487 - protein, 70 aa, Synthetic construct
RKIYLRPAICDKARQKQQRKRCPNCDGPLKLIPCRGHGGFPVTNFQSKGEHDHPKPETKLEAEARRAMKK

SEQ ID NO: 20488 - protein, 70 aa, Synthetic construct
RKIYLRPAICDKARQKQQRKRCPNCDGPLKLIPCRGHGGFPVTNFWRHDGHDHPKPETKLEAEARRAMKK

SEQ ID NO: 20489 - protein, 70 aa, Synthetic construct
RKIYLRPAICDKARQKQQRKRCPNCDGPLKLIPCRGHGGFPVTNFWRHDGRFIFFPETKLEAEARRAMKK

SEQ ID NO: 20490 - protein, 70 aa, Synthetic construct
RKIYLRPAICDKARQKQQRKRCPNCDGPLKLIPCRGHGGFPVTNFWRHDGRFIFFQSKGEEAEARRAMKK

SEQ ID NO: 20491 - protein, 70 aa, Synthetic construct
RKIYLRPAICDKARQKQQRKRCPNCDGPLKLIPCRGHGGFPVTNFWRHDGRFIFFQSKGEHDHPKRAMKK

SEQ ID NO: 20492 - protein, 70 aa, Synthetic construct
RKIYLRPAICDKARQKQQRKRCPNCDGPLKLIPCRGHGGFPVTNFWRHDGRFIFFQSKGEHDHPKPETKL

SEQ ID NO: 20493 - protein, 70 aa, Synthetic construct
VIKSEAASPALPVITKVETLSPESALQGSPRSAASTPAGSPDGSLPEHHAAAPNGLPGFSVENIMTLRTS

SEQ ID NO: 20494 - protein, 70 aa, Synthetic construct
DAPKEAASPALPVITKVETLSPESALQGSPRSAASTPAGSPDGSLPEHHAAAPNGLPGFSVENIMTLRTS

SEQ ID NO: 20495 - protein, 70 aa, Synthetic construct
DAPKEAEKKVLPVITKVETLSPESALQGSPRSAASTPAGSPDGSLPEHHAAAPNGLPGFSVENIMTLRTS

SEQ ID NO: 20496 - protein, 70 aa, Synthetic construct
DAPKEAEKKVVIKSEKVETLSPESALQGSPRSAASTPAGSPDGSLPEHHAAAPNGLPGFSVENIMTLRTS

SEQ ID NO: 20497 - protein, 70 aa, Synthetic construct
DAPKEAEKKVVIKSEAASPASPESALQGSPRSAASTPAGSPDGSLPEHHAAAPNGLPGFSVENIMTLRTS

SEQ ID NO: 20498 - protein, 70 aa, Synthetic construct
DAPKEAEKKVVIKSEAASPALPVITLQGSPRSAASTPAGSPDGSLPEHHAAAPNGLPGFSVENIMTLRTS

SEQ ID NO: 20499 - protein, 70 aa, Synthetic construct
DAPKEAEKKVVIKSEAASPALPVITKVETLRSAASTPAGSPDGSLPEHHAAAPNGLPGFSVENIMTLRTS

SEQ ID NO: 20500 - protein, 70 aa, Synthetic construct
DAPKEAEKKVVIKSEAASPALPVITKVETLSPESATPAGSPDGSLPEHHAAAPNGLPGFSVENIMTLRTS

SEQ ID NO: 20501 - protein, 70 aa, Synthetic construct
DAPKEAEKKVVIKSEAASPALPVITKVETLSPESALQGSPPDGSLPEHHAAAPNGLPGFSVENIMTLRTS

SEQ ID NO: 20502 - protein, 70 aa, Synthetic construct
DAPKEAEKKVVIKSEAASPALPVITKVETLSPESALQGSPRSAASPEHHAAAPNGLPGFSVENIMTLRTS

SEQ ID NO: 20503 - protein, 70 aa, Synthetic construct
DAPKEAEKKVVIKSEAASPALPVITKVETLSPESALQGSPRSAASTPAGSAAPNGLPGFSVENIMTLRTS

SEQ ID NO: 20504 - protein, 70 aa, Synthetic construct
DAPKEAEKKVVIKSEAASPALPVITKVETLSPESALQGSPRSAASTPAGSPDGSLLPGFSVENIMTLRTS

SEQ ID NO: 20505 - protein, 70 aa, Synthetic construct
DAPKEAEKKVVIKSEAASPALPVITKVETLSPESALQGSPRSAASTPAGSPDGSLPEHHAVENIMTLRTS

SEQ ID NO: 20506 - protein, 70 aa, Synthetic construct
DAPKEAEKKVVIKSEAASPALPVITKVETLSPESALQGSPRSAASTPAGSPDGSLPEHHAAAPNGTLRTS

SEQ ID NO: 20507 - protein, 70 aa, Synthetic construct
DAPKEAEKKVVIKSEAASPALPVITKVETLSPESALQGSPRSAASTPAGSPDGSLPEHHAAAPNGLPGFS

SEQ ID NO: 20508 - protein, 70 aa, Synthetic construct
KCRNKKKEKTECLQKESEKLESVNAELKAQIEELKNEKQHLIYMLNLHRPTCIVRAQNGRTPEDERNLFI

SEQ ID NO: 20509 - protein, 70 aa, Synthetic construct
RRERNKKEKTECLQKESEKLESVNAELKAQIEELKNEKQHLIYMLNLHRPTCIVRAQNGRTPEDERNLFI

SEQ ID NO: 20510 - protein, 70 aa, Synthetic construct
RRERNKIAAAECLQKESEKLESVNAELKAQIEELKNEKQHLIYMLNLHRPTCIVRAQNGRTPEDERNLFI

SEQ ID NO: 20511 - protein, 70 aa, Synthetic construct
RRERNKIAAAKCRNKESEKLESVNAELKAQIEELKNEKQHLIYMLNLHRPTCIVRAQNGRTPEDERNLFI

SEQ ID NO: 20512 - protein, 70 aa, Synthetic construct
RRERNKIAAAKCRNKKKEKTESVNAELKAQIEELKNEKQHLIYMLNLHRPTCIVRAQNGRTPEDERNLFI

SEQ ID NO: 20513 - protein, 70 aa, Synthetic construct
RRERNKIAAAKCRNKKKEKTECLQKELKAQIEELKNEKQHLIYMLNLHRPTCIVRAQNGRTPEDERNLFI

SEQ ID NO: 20514 - protein, 70 aa, Synthetic construct
RRERNKIAAAKCRNKKKEKTECLQKESEKLIEELKNEKQHLIYMLNLHRPTCIVRAQNGRTPEDERNLFI

SEQ ID NO: 20515 - protein, 70 aa, Synthetic construct
RRERNKIAAAKCRNKKKEKTECLQKESEKLESVNANEKQHLIYMLNLHRPTCIVRAQNGRTPEDERNLFI

SEQ ID NO: 20516 - protein, 70 aa, Synthetic construct
RRERNKIAAAKCRNKKKEKTECLQKESEKLESVNAELKAQLIYMLNLHRPTCIVRAQNGRTPEDERNLFI

SEQ ID NO: 20517 - protein, 70 aa, Synthetic construct
RRERNKIAAAKCRNKKKEKTECLQKESEKLESVNAELKAQIEELKNLHRPTCIVRAQNGRTPEDERNLFI

SEQ ID NO: 20518 - protein, 70 aa, Synthetic construct
RRERNKIAAAKCRNKKKEKTECLQKESEKLESVNAELKAQIEELKNEKQHLIYMLNLHRPTCIVRRNLFI

SEQ ID NO: 20519 - protein, 70 aa, Synthetic construct
RRERNKIAAAKCRNKKKEKTECLQKESEKLESVNAELKAQIEELKNEKQHLIYMLNLHRPTCIVRAQNGR

SEQ ID NO: 20520 - protein, 70 aa, Synthetic construct
KIEPEETTEARTHNLRRRMGCPTPKCENEKEMKSSIKQEPIERKDYIVENEKEKPKSRSKKATNAVDLYV

SEQ ID NO: 20521 - protein, 70 aa, Synthetic construct
KRMRAETTEARTHNLRRRMGCPTPKCENEKEMKSSIKQEPIERKDYIVENEKEKPKSRSKKATNAVDLYV

SEQ ID NO: 20522 - protein, 70 aa, Synthetic construct
KRMRAEAMNIRTHNLRRRMGCPTPKCENEKEMKSSIKQEPIERKDYIVENEKEKPKSRSKKATNAVDLYV

SEQ ID NO: 20523 - protein, 70 aa, Synthetic construct
KRMRAEAMNIKIEPEETTEACPTPKCENEKEMKSSIKQEPIERKDYIVENEKEKPKSRSKKATNAVDLYV

SEQ ID NO: 20524 - protein, 70 aa, Synthetic construct
KRMRAEAMNIKIEPEETTEARTHNLRRRMGEMKSSIKQEPIERKDYIVENEKEKPKSRSKKATNAVDLYV

SEQ ID NO: 20525 - protein, 70 aa, Synthetic construct
KRMRAEAMNIKIEPEETTEARTHNLRRRMGCPTPKIKQEPIERKDYIVENEKEKPKSRSKKATNAVDLYV

SEQ ID NO: 20526 - protein, 70 aa, Synthetic construct
KRMRAEAMNIKIEPEETTEARTHNLRRRMGCPTPKCENEKIERKDYIVENEKEKPKSRSKKATNAVDLYV

SEQ ID NO: 20527 - protein, 70 aa, Synthetic construct
KRMRAEAMNIKIEPEETTEARTHNLRRRMGCPTPKCENEKEMKSSYIVENEKEKPKSRSKKATNAVDLYV

SEQ ID NO: 20528 - protein, 70 aa, Synthetic construct
KRMRAEAMNIKIEPEETTEARTHNLRRRMGCPTPKCENEKEMKSSIKQEPEKEKPKSRSKKATNAVDLYV

SEQ ID NO: 20529 - protein, 70 aa, Synthetic construct
KRMRAEAMNIKIEPEETTEARTHNLRRRMGCPTPKCENEKEMKSSIKQEPIERKDKSRSKKATNAVDLYV

SEQ ID NO: 20530 - protein, 70 aa, Synthetic construct
KRMRAEAMNIKIEPEETTEARTHNLRRRMGCPTPKCENEKEMKSSIKQEPIERKDYIVENKATNAVDLYV

SEQ ID NO: 20531 - protein, 70 aa, Synthetic construct
KRMRAEAMNIKIEPEETTEARTHNLRRRMGCPTPKCENEKEMKSSIKQEPIERKDYIVENEKEKPVDLYV

SEQ ID NO: 20532 - protein, 70 aa, Synthetic construct
FNHPFSINNLMSSEQQHHHSHHHHQQVMHYPGYGSPMPGSLAMGPVTNKTGLDASPLAADTSYYQGVYSR

SEQ ID NO: 20533 - protein, 70 aa, Synthetic construct
FNHPFSINNLMSSEQQHHHSHHHHQPHKMDLKAYEQVMHYLAMGPVTNKTGLDASPLAADTSYYQGVYSR

SEQ ID NO: 20534 - protein, 70 aa, Synthetic construct
FNHPFSINNLMSSEQQHHHSHHHHQPHKMDLKAYEQVMHYPGYGSPMPGSGLDASPLAADTSYYQGVYSR

SEQ ID NO: 20535 - protein, 70 aa, Synthetic construct
FNHPFSINNLMSSEQQHHHSHHHHQPHKMDLKAYEQVMHYPGYGSPMPGSLAMGPPLAADTSYYQGVYSR

SEQ ID NO: 20536 - protein, 70 aa, Synthetic construct
FNHPFSINNLMSSEQQHHHSHHHHQPHKMDLKAYEQVMHYPGYGSPMPGSLAMGPVTNKTTSYYQGVYSR

SEQ ID NO: 20537 - protein, 70 aa, Synthetic construct
ERVKMINVQRLLEAAEFLERSSFPSMPSPRLQHSKPPRRLSRAQKHSSGSSNTSTANRSTHNELEKNRRA

SEQ ID NO: 20538 - protein, 70 aa, Synthetic construct
ERVKMINVQRLLEAAEFLERRERECMPSPRLQHSKPPRRLSRAQKHSSGSSNTSTANRSTHNELEKNRRA

SEQ ID NO: 20539 - protein, 70 aa, Synthetic construct
ERVKMINVQRLLEAAEFLERRERECEHGYALQHSKPPRRLSRAQKHSSGSSNTSTANRSTHNELEKNRRA

SEQ ID NO: 20540 - protein, 70 aa, Synthetic construct
ERVKMINVQRLLEAAEFLERRERECEHGYASSFPSPPRRLSRAQKHSSGSSNTSTANRSTHNELEKNRRA

SEQ ID NO: 20541 - protein, 70 aa, Synthetic construct
ERVKMINVQRLLEAAEFLERRERECEHGYASSFPSMPSPRSRAQKHSSGSSNTSTANRSTHNELEKNRRA

SEQ ID NO: 20542 - protein, 70 aa, Synthetic construct
ERVKMINVQRLLEAAEFLERRERECEHGYASSFPSMPSPRLQHSKHSSGSSNTSTANRSTHNELEKNRRA

SEQ ID NO: 20543 - protein, 70 aa, Synthetic construct
ERVKMINVQRLLEAAEFLERRERECEHGYASSFPSMPSPRLQHSKPPRRLSNTSTANRSTHNELEKNRRA

SEQ ID NO: 20544 - protein, 70 aa, Synthetic construct
ERVKMINVQRLLEAAEFLERRERECEHGYASSFPSMPSPRLQHSKPPRRLSRAQKANRSTHNELEKNRRA

SEQ ID NO: 20545 - protein, 70 aa, Synthetic construct
ERVKMINVQRLLEAAEFLERRERECEHGYASSFPSMPSPRLQHSKPPRRLSRAQKHSSGSHNELEKNRRA

SEQ ID NO: 20546 - protein, 70 aa, Synthetic construct
ERVKMINVQRLLEAAEFLERRERECEHGYASSFPSMPSPRLQHSKPPRRLSRAQKHSSGSSNTSTKNRRA

SEQ ID NO: 20547 - protein, 70 aa, Synthetic construct
ERVKMINVQRLLEAAEFLERRERECEHGYASSFPSMPSPRLQHSKPPRRLSRAQKHSSGSSNTSTANRST

SEQ ID NO: 20548 - protein, 70 aa, Synthetic construct
ESSSSDSDPDSASPPSTGQNPSVSVQTSQDWKPTRSLIEHVFVTDVTANLITVTVKESPTSVGFFNLRHY

SEQ ID NO: 20549 - protein, 70 aa, Synthetic construct
ATLPEDSDPDSASPPSTGQNPSVSVQTSQDWKPTRSLIEHVFVTDVTANLITVTVKESPTSVGFFNLRHY

SEQ ID NO: 20550 - protein, 70 aa, Synthetic construct
ATLPEMSAGESASPPSTGQNPSVSVQTSQDWKPTRSLIEHVFVTDVTANLITVTVKESPTSVGFFNLRHY

SEQ ID NO: 20551 - protein, 70 aa, Synthetic construct
ATLPEMSAGEESSSSSTGQNPSVSVQTSQDWKPTRSLIEHVFVTDVTANLITVTVKESPTSVGFFNLRHY

SEQ ID NO: 20552 - protein, 70 aa, Synthetic construct
ATLPEMSAGEESSSSDSDPDPSVSVQTSQDWKPTRSLIEHVFVTDVTANLITVTVKESPTSVGFFNLRHY

SEQ ID NO: 20553 - protein, 70 aa, Synthetic construct
ATLPEMSAGEESSSSDSDPDSASPPQTSQDWKPTRSLIEHVFVTDVTANLITVTVKESPTSVGFFNLRHY

SEQ ID NO: 20554 - protein, 70 aa, Synthetic construct
ATLPEMSAGEESSSSDSDPDSASPPSTGQNWKPTRSLIEHVFVTDVTANLITVTVKESPTSVGFFNLRHY

SEQ ID NO: 20555 - protein, 70 aa, Synthetic construct
ATLPEMSAGEESSSSDSDPDSASPPSTGQNPSVSVSLIEHVFVTDVTANLITVTVKESPTSVGFFNLRHY

SEQ ID NO: 20556 - protein, 70 aa, Synthetic construct
ATLPEMSAGEESSSSDSDPDSASPPSTGQNPSVSVQTSQDVFVTDVTANLITVTVKESPTSVGFFNLRHY

SEQ ID NO: 20557 - protein, 70 aa, Synthetic construct
ATLPEMSAGEESSSSDSDPDSASPPSTGQNPSVSVQTSQDWKPTRSLIEHVFVTDVTANLITVTVNLRHY

SEQ ID NO: 20558 - protein, 70 aa, Synthetic construct
NRMHDLNAALDNLRKVVPCYSKTQKLSKIETLRLAKNYIWALSEILRSGKRPDLVSQPTTNLVAGCLQLN

SEQ ID NO: 20559 - protein, 70 aa, Synthetic construct
NRMHDLNAALDNLRKVVPCYSKTQKLSKIETLRLAKNYIWALSEILRSGKRPDLVSYVQTLCKGLSQPTT

SEQ ID NO: 20560 - protein, 70 aa, Synthetic construct
GDSAPQSPLVPIKMEDTTQDAEHGAWALGHKLCSIMVKQEQSPELPVDPLAAPSAMAAAAAMATTPLLGL

SEQ ID NO: 20561 - protein, 70 aa, Synthetic construct
IQAEHQSPLVPIKMEDTTQDAEHGAWALGHKLCSIMVKQEQSPELPVDPLAAPSAMAAAAAMATTPLLGL

SEQ ID NO: 20562 - protein, 70 aa, Synthetic construct
IQAEHSYSLSPIKMEDTTQDAEHGAWALGHKLCSIMVKQEQSPELPVDPLAAPSAMAAAAAMATTPLLGL

SEQ ID NO: 20563 - protein, 70 aa, Synthetic construct
IQAEHSYSLSGDSAPDTTQDAEHGAWALGHKLCSIMVKQEQSPELPVDPLAAPSAMAAAAAMATTPLLGL

SEQ ID NO: 20564 - protein, 70 aa, Synthetic construct
IQAEHSYSLSGDSAPQSPLVAEHGAWALGHKLCSIMVKQEQSPELPVDPLAAPSAMAAAAAMATTPLLGL

SEQ ID NO: 20565 - protein, 70 aa, Synthetic construct
IQAEHSYSLSGDSAPQSPLVPIKMEWALGHKLCSIMVKQEQSPELPVDPLAAPSAMAAAAAMATTPLLGL

SEQ ID NO: 20566 - protein, 70 aa, Synthetic construct
IQAEHSYSLSGDSAPQSPLVPIKMEDTTQDKLCSIMVKQEQSPELPVDPLAAPSAMAAAAAMATTPLLGL

SEQ ID NO: 20567 - protein, 70 aa, Synthetic construct
IQAEHSYSLSGDSAPQSPLVPIKMEDTTQDAEHGAMVKQEQSPELPVDPLAAPSAMAAAAAMATTPLLGL

SEQ ID NO: 20568 - protein, 70 aa, Synthetic construct
IQAEHSYSLSGDSAPQSPLVPIKMEDTTQDAEHGAWALGHQSPELPVDPLAAPSAMAAAAAMATTPLLGL

SEQ ID NO: 20569 - protein, 70 aa, Synthetic construct
IQAEHSYSLSGDSAPQSPLVPIKMEDTTQDAEHGAWALGHKLCSIPVDPLAAPSAMAAAAAMATTPLLGL

SEQ ID NO: 20570 - protein, 70 aa, Synthetic construct
IQAEHSYSLSGDSAPQSPLVPIKMEDTTQDAEHGAWALGHKLCSIMVKQEAAPSAMAAAAAMATTPLLGL

SEQ ID NO: 20571 - protein, 70 aa, Synthetic construct
IQAEHSYSLSGDSAPQSPLVPIKMEDTTQDAEHGAWALGHKLCSIMVKQEQSPELMAAAAAMATTPLLGL

SEQ ID NO: 20572 - protein, 70 aa, Synthetic construct
IQAEHSYSLSGDSAPQSPLVPIKMEDTTQDAEHGAWALGHKLCSIMVKQEQSPELPVDPLAMATTPLLGL

SEQ ID NO: 20573 - protein, 70 aa, Synthetic construct
IQAEHSYSLSGDSAPQSPLVPIKMEDTTQDAEHGAWALGHKLCSIMVKQEQSPELPVDPLAAPSAPLLGL

SEQ ID NO: 20574 - protein, 70 aa, Synthetic construct
IQAEHSYSLSGDSAPQSPLVPIKMEDTTQDAEHGAWALGHKLCSIMVKQEQSPELPVDPLAAPSAMAAAA

SEQ ID NO: 20575 - protein, 70 aa, Synthetic construct
RKVDTKPPVYLLLELEDKDGLQSAQPTEGQGSLLTNWPSVPPTIKEEENSEEELAAATTSKEQEPIGTDL

SEQ ID NO: 20576 - protein, 70 aa, Synthetic construct
RKVDTGGFLSLLLELEDKDGLQSAQPTEGQGSLLTNWPSVPPTIKEEENSEEELAAATTSKEQEPIGTDL

SEQ ID NO: 20577 - protein, 70 aa, Synthetic construct
RKVDTGGFLSESKDCEDKDGLQSAQPTEGQGSLLTNWPSVPPTIKEEENSEEELAAATTSKEQEPIGTDL

SEQ ID NO: 20578 - protein, 70 aa, Synthetic construct
RKVDTGGFLSESKDCKPPVYLQSAQPTEGQGSLLTNWPSVPPTIKEEENSEEELAAATTSKEQEPIGTDL

SEQ ID NO: 20579 - protein, 70 aa, Synthetic construct
RKVDTGGFLSESKDCKPPVYLLLELPTEGQGSLLTNWPSVPPTIKEEENSEEELAAATTSKEQEPIGTDL

SEQ ID NO: 20580 - protein, 70 aa, Synthetic construct
RKVDTGGFLSESKDCKPPVYLLLELEDKDGGSLLTNWPSVPPTIKEEENSEEELAAATTSKEQEPIGTDL

SEQ ID NO: 20581 - protein, 70 aa, Synthetic construct
RKVDTGGFLSESKDCKPPVYLLLELEDKDGLQSAQNWPSVPPTIKEEENSEEELAAATTSKEQEPIGTDL

SEQ ID NO: 20582 - protein, 70 aa, Synthetic construct
RKVDTGGFLSESKDCKPPVYLLLELEDKDGLQSAQPTEGQPPTIKEEENSEEELAAATTSKEQEPIGTDL

SEQ ID NO: 20583 - protein, 70 aa, Synthetic construct
RKVDTGGFLSESKDCKPPVYLLLELEDKDGLQSAQPTEGQGSLLTNWPSVPPTIKEEENSKEQEPIGTDL

SEQ ID NO: 20584 - protein, 70 aa, Synthetic construct
RKVDTGGFLSESKDCKPPVYLLLELEDKDGLQSAQPTEGQGSLLTNWPSVPPTIKEEENSEEELAIGTDL

SEQ ID NO: 20585 - protein, 70 aa, Synthetic construct
RKVDTGGFLSESKDCKPPVYLLLELEDKDGLQSAQPTEGQGSLLTNWPSVPPTIKEEENSEEELAAATTS

SEQ ID NO: 20586 - protein, 70 aa, Synthetic construct
EEELAAATTSKEQEPIGTDLDAVRTPEPLEEFPKREDQEGSPPETSLPYKWVVEAANLLIPAVGSSLSEA

SEQ ID NO: 20587 - protein, 70 aa, Synthetic construct
PPTIKAATTSKEQEPIGTDLDAVRTPEPLEEFPKREDQEGSPPETSLPYKWVVEAANLLIPAVGSSLSEA

SEQ ID NO: 20588 - protein, 70 aa, Synthetic construct
PPTIKEEENSKEQEPIGTDLDAVRTPEPLEEFPKREDQEGSPPETSLPYKWVVEAANLLIPAVGSSLSEA

SEQ ID NO: 20589 - protein, 70 aa, Synthetic construct
PPTIKEEENSEEELAIGTDLDAVRTPEPLEEFPKREDQEGSPPETSLPYKWVVEAANLLIPAVGSSLSEA

SEQ ID NO: 20590 - protein, 70 aa, Synthetic construct
PPTIKEEENSEEELAAATTSDAVRTPEPLEEFPKREDQEGSPPETSLPYKWVVEAANLLIPAVGSSLSEA

SEQ ID NO: 20591 - protein, 70 aa, Synthetic construct
PPTIKEEENSEEELAAATTSKEQEPPEPLEEFPKREDQEGSPPETSLPYKWVVEAANLLIPAVGSSLSEA

SEQ ID NO: 20592 - protein, 70 aa, Synthetic construct
PPTIKEEENSEEELAAATTSKEQEPIGTDLEFPKREDQEGSPPETSLPYKWVVEAANLLIPAVGSSLSEA

SEQ ID NO: 20593 - protein, 70 aa, Synthetic construct
PPTIKEEENSEEELAAATTSKEQEPIGTDLDAVRTEDQEGSPPETSLPYKWVVEAANLLIPAVGSSLSEA

SEQ ID NO: 20594 - protein, 70 aa, Synthetic construct
PPTIKEEENSEEELAAATTSKEQEPIGTDLDAVRTPEPLESPPETSLPYKWVVEAANLLIPAVGSSLSEA

SEQ ID NO: 20595 - protein, 70 aa, Synthetic construct
PPTIKEEENSEEELAAATTSKEQEPIGTDLDAVRTPEPLEEFPKRSLPYKWVVEAANLLIPAVGSSLSEA

SEQ ID NO: 20596 - protein, 70 aa, Synthetic construct
PPTIKEEENSEEELAAATTSKEQEPIGTDLDAVRTPEPLEEFPKREDQEGWVVEAANLLIPAVGSSLSEA

SEQ ID NO: 20597 - protein, 70 aa, Synthetic construct
PPTIKEEENSEEELAAATTSKEQEPIGTDLDAVRTPEPLEEFPKREDQEGSPPETANLLIPAVGSSLSEA

SEQ ID NO: 20598 - protein, 70 aa, Synthetic construct
PPTIKEEENSEEELAAATTSKEQEPIGTDLDAVRTPEPLEEFPKREDQEGSPPETSLPYKPAVGSSLSEA

SEQ ID NO: 20599 - protein, 70 aa, Synthetic construct
PPTIKEEENSEEELAAATTSKEQEPIGTDLDAVRTPEPLEEFPKREDQEGSPPETSLPYKWVVEASLSEA

SEQ ID NO: 20600 - protein, 70 aa, Synthetic construct
PPTIKEEENSEEELAAATTSKEQEPIGTDLDAVRTPEPLEEFPKREDQEGSPPETSLPYKWVVEAANLLI

SEQ ID NO: 20601 - protein, 70 aa, Synthetic construct
SPPETSLPYKWVVEASLSEALDLIESDPDAWCDLSKFDLPEEPSAEDSINNSLVQLQASHQQQVLPPRQP

SEQ ID NO: 20602 - protein, 70 aa, Synthetic construct
SPPETSLPYKWVVEAANLLIPAVGSSDPDAWCDLSKFDLPEEPSAEDSINNSLVQLQASHQQQVLPPRQP

SEQ ID NO: 20603 - protein, 70 aa, Synthetic construct
SPPETSLPYKWVVEAANLLIPAVGSSLSEAWCDLSKFDLPEEPSAEDSINNSLVQLQASHQQQVLPPRQP

SEQ ID NO: 20604 - protein, 70 aa, Synthetic construct
SPPETSLPYKWVVEAANLLIPAVGSSLSEALDLIEKFDLPEEPSAEDSINNSLVQLQASHQQQVLPPRQP

SEQ ID NO: 20605 - protein, 70 aa, Synthetic construct
SPPETSLPYKWVVEAANLLIPAVGSSLSEALDLIESDPDAEEPSAEDSINNSLVQLQASHQQQVLPPRQP

SEQ ID NO: 20606 - protein, 70 aa, Synthetic construct
SPPETSLPYKWVVEAANLLIPAVGSSLSEALDLIESDPDAWCDLSEDSINNSLVQLQASHQQQVLPPRQP

SEQ ID NO: 20607 - protein, 70 aa, Synthetic construct
SPPETSLPYKWVVEAANLLIPAVGSSLSEALDLIESDPDAWCDLSKFDLPNSLVQLQASHQQQVLPPRQP

SEQ ID NO: 20608 - protein, 70 aa, Synthetic construct
SPPETSLPYKWVVEAANLLIPAVGSSLSEALDLIESDPDAWCDLSKFDLPEEPSALQASHQQQVLPPRQP

SEQ ID NO: 20609 - protein, 70 aa, Synthetic construct
SPPETSLPYKWVVEAANLLIPAVGSSLSEALDLIESDPDAWCDLSKFDLPEEPSAEDSINQQQVLPPRQP

SEQ ID NO: 20610 - protein, 70 aa, Synthetic construct
SPPETSLPYKWVVEAANLLIPAVGSSLSEALDLIESDPDAWCDLSKFDLPEEPSAEDSINNSLVQPPRQP

SEQ ID NO: 20611 - protein, 70 aa, Synthetic construct
SPPETSLPYKWVVEAANLLIPAVGSSLSEALDLIESDPDAWCDLSKFDLPEEPSAEDSINNSLVQLQASH

SEQ ID NO: 20612 - protein, 70 aa, Synthetic construct
AAAPEGDWARLLEQMGALAVRGSRRERELERRELAVEQGERALERAAAQARRELQAEREALQARLRDVSR

SEQ ID NO: 20613 - protein, 70 aa, Synthetic construct
AAAPEGDWARLLEQMGALAVRGSRRERELERRELAVEQGERALERRRRALRRELQAEREALQARLRDVSR

SEQ ID NO: 20614 - protein, 70 aa, Synthetic construct
AAAPEGDWARLLEQMGALAVRGSRRERELERRELAVEQGERALERRRRALQEEERAAAQALQARLRDVSR

SEQ ID NO: 20615 - protein, 70 aa, Synthetic construct
AAAPEGDWARLLEQMGALAVRGSRRERELERRELAVEQGERALERRRRALQEEERAAAQARRELQRDVSR

SEQ ID NO: 20616 - protein, 70 aa, Synthetic construct
AAAPEGDWARLLEQMGALAVRGSRRERELERRELAVEQGERALERRRRALQEEERAAAQARRELQAEREA

SEQ ID NO: 20617 - protein, 70 aa, Synthetic construct
MVKLANPLYTKKQKQRPSEERICNAVSSSHGLDRKTVLEQLELSVKDGTILKVSNKGLNSYKDPDNPGRI

SEQ ID NO: 20618 - protein, 70 aa, Synthetic construct
MVKLANPLYTEWILEAIKKVKKQKQRPSEERICNATVLEQLELSVKDGTILKVSNKGLNSYKDPDNPGRI

SEQ ID NO: 20619 - protein, 70 aa, Synthetic construct
MVKLANPLYTEWILEAIKKVKKQKQRPSEERICNAVSSSHGLDRKTVLEQLKVSNKGLNSYKDPDNPGRI

SEQ ID NO: 20620 - protein, 70 aa, Synthetic construct
EIAQHLEQQNDLLQMIRRSQEVQACAQERQAQAMEGTQAALSVLIQVLRPMIKDFRRYLQSNTANPAPAS

SEQ ID NO: 20621 - protein, 70 aa, Synthetic construct
EQRVTLEQQNDLLQMIRRSQEVQACAQERQAQAMEGTQAALSVLIQVLRPMIKDFRRYLQSNTANPAPAS

SEQ ID NO: 20622 - protein, 70 aa, Synthetic construct
EQRVTNLHVKDLLQMIRRSQEVQACAQERQAQAMEGTQAALSVLIQVLRPMIKDFRRYLQSNTANPAPAS

SEQ ID NO: 20623 - protein, 70 aa, Synthetic construct
EQRVTNLHVKEIAQHIRRSQEVQACAQERQAQAMEGTQAALSVLIQVLRPMIKDFRRYLQSNTANPAPAS

SEQ ID NO: 20624 - protein, 70 aa, Synthetic construct
EQRVTNLHVKEIAQHLEQQNEVQACAQERQAQAMEGTQAALSVLIQVLRPMIKDFRRYLQSNTANPAPAS

SEQ ID NO: 20625 - protein, 70 aa, Synthetic construct
EQRVTNLHVKEIAQHLEQQNDLLQMAQERQAQAMEGTQAALSVLIQVLRPMIKDFRRYLQSNTANPAPAS

SEQ ID NO: 20626 - protein, 70 aa, Synthetic construct
EQRVTNLHVKEIAQHLEQQNDLLQMIRRSQAQAMEGTQAALSVLIQVLRPMIKDFRRYLQSNTANPAPAS

SEQ ID NO: 20627 - protein, 70 aa, Synthetic construct
EQRVTNLHVKEIAQHLEQQNDLLQMIRRSQEVQACGTQAALSVLIQVLRPMIKDFRRYLQSNTANPAPAS

SEQ ID NO: 20628 - protein, 70 aa, Synthetic construct
EQRVTNLHVKEIAQHLEQQNDLLQMIRRSQEVQACAQERQLSVLIQVLRPMIKDFRRYLQSNTANPAPAS

SEQ ID NO: 20629 - protein, 70 aa, Synthetic construct
EQRVTNLHVKEIAQHLEQQNDLLQMIRRSQEVQACAQERQAQAMEQVLRPMIKDFRRYLQSNTANPAPAS

SEQ ID NO: 20630 - protein, 70 aa, Synthetic construct
EQRVTNLHVKEIAQHLEQQNDLLQMIRRSQEVQACAQERQAQAMEGTQAALSVLIRRYLQSNTANPAPAS

SEQ ID NO: 20631 - protein, 70 aa, Synthetic construct
EQRVTNLHVKEIAQHLEQQNDLLQMIRRSQEVQACAQERQAQAMEGTQAALSVLIQVLRPSNTANPAPAS

SEQ ID NO: 20632 - protein, 70 aa, Synthetic construct
EQRVTNLHVKEIAQHLEQQNDLLQMIRRSQEVQACAQERQAQAMEGTQAALSVLIQVLRPMIKDFPAPAS

SEQ ID NO: 20633 - protein, 70 aa, Synthetic construct
EQRVTNLHVKEIAQHLEQQNDLLQMIRRSQEVQACAQERQAQAMEGTQAALSVLIQVLRPMIKDFRRYLQ

SEQ ID NO: 20634 - protein, 70 aa, Synthetic construct
AFTQLTFRDVAIEFSQDEWKCLNSTQRTLYRDVMLENYRNVIKELAPQQEGNPGEVFHTVTLEQHEKHDI

SEQ ID NO: 20635 - protein, 70 aa, Synthetic construct
AFTQLTFRDVAIEFSQDEWKCLNSTQRTLYRDVMLENYRNLVSLDAPQQEGNPGEVFHTVTLEQHEKHDI

SEQ ID NO: 20636 - protein, 70 aa, Synthetic construct
AFTQLTFRDVAIEFSQDEWKCLNSTQRTLYRDVMLENYRNLVSLDLSRNCGNPGEVFHTVTLEQHEKHDI

SEQ ID NO: 20637 - protein, 70 aa, Synthetic construct
AFTQLTFRDVAIEFSQDEWKCLNSTQRTLYRDVMLENYRNLVSLDLSRNCVIKELVFHTVTLEQHEKHDI

SEQ ID NO: 20638 - protein, 70 aa, Synthetic construct
AFTQLTFRDVAIEFSQDEWKCLNSTQRTLYRDVMLENYRNLVSLDLSRNCVIKELAPQQETLEQHEKHDI

SEQ ID NO: 20639 - protein, 70 aa, Synthetic construct
AFTQLTFRDVAIEFSQDEWKCLNSTQRTLYRDVMLENYRNLVSLDLSRNCVIKELAPQQEGNPGEEKHDI

SEQ ID NO: 20640 - protein, 70 aa, Synthetic construct
AFTQLTFRDVAIEFSQDEWKCLNSTQRTLYRDVMLENYRNLVSLDLSRNCVIKELAPQQEGNPGEVFHTV

SEQ ID NO: 20641 - protein, 70 aa, Synthetic construct
TALQQKQVSLEAWLQREAQTLQQYRVELAEKHQKTLQLLRLIQWKRRQQLAGNGGPPEGSLDVLQSWCEK

SEQ ID NO: 20642 - protein, 70 aa, Synthetic construct
TALQQKQVSLEAWLQREAQTLQQYRVELAEKHQKTLQLLRKQQTIILDDELIQWKPPEGSLDVLQSWCEK

SEQ ID NO: 20643 - protein, 70 aa, Synthetic construct
TALQQKQVSLEAWLQREAQTLQQYRVELAEKHQKTLQLLRKQQTIILDDELIQWKRRQQLLDVLQSWCEK

SEQ ID NO: 20644 - protein, 70 aa, Synthetic construct
TALQQKQVSLEAWLQREAQTLQQYRVELAEKHQKTLQLLRKQQTIILDDELIQWKRRQQLAGNGGSWCEK

SEQ ID NO: 20645 - protein, 70 aa, Synthetic construct
SENESLWKEVSELRAKHAQQQQVIRKIVQFIVTLVQNNQLVSLKRKRPLLLNTNGAQKKNLFQHIVKEPT

SEQ ID NO: 20646 - protein, 70 aa, Synthetic construct
TIESRLWKEVSELRAKHAQQQQVIRKIVQFIVTLVQNNQLVSLKRKRPLLLNTNGAQKKNLFQHIVKEPT

SEQ ID NO: 20647 - protein, 70 aa, Synthetic construct
TIESRLSELKSELRAKHAQQQQVIRKIVQFIVTLVQNNQLVSLKRKRPLLLNTNGAQKKNLFQHIVKEPT

SEQ ID NO: 20648 - protein, 70 aa, Synthetic construct
TIESRLSELKSENESLWKEVSELRAKHAQQQQVIRKIVQFVSLKRKRPLLLNTNGAQKKNLFQHIVKEPT

SEQ ID NO: 20649 - protein, 70 aa, Synthetic construct
TIESRLSELKSENESLWKEVSELRAKHAQQQQVIRKIVQFIVTLVKRPLLLNTNGAQKKNLFQHIVKEPT

SEQ ID NO: 20650 - protein, 70 aa, Synthetic construct
TIESRLSELKSENESLWKEVSELRAKHAQQQQVIRKIVQFIVTLVQNNQLLNTNGAQKKNLFQHIVKEPT

SEQ ID NO: 20651 - protein, 70 aa, Synthetic construct
TIESRLSELKSENESLWKEVSELRAKHAQQQQVIRKIVQFIVTLVQNNQLVSLKRAQKKNLFQHIVKEPT

SEQ ID NO: 20652 - protein, 70 aa, Synthetic construct
TIESRLSELKSENESLWKEVSELRAKHAQQQQVIRKIVQFIVTLVQNNQLVSLKRKRPLLLFQHIVKEPT

SEQ ID NO: 20653 - protein, 70 aa, Synthetic construct
TIESRLSELKSENESLWKEVSELRAKHAQQQQVIRKIVQFIVTLVQNNQLVSLKRKRPLLLNTNGVKEPT

SEQ ID NO: 20654 - protein, 70 aa, Synthetic construct
VLRVVGESGEPVKAFKCEHCRILFLDHVMFTIHMGCHGFRDPFECNICGYHSQDRYEFSSHIVRGEHKVG

SEQ ID NO: 20655 - protein, 70 aa, Synthetic construct
LRGTPGESGEPVKAFKCEHCRILFLDHVMFTIHMGCHGFRDPFECNICGYHSQDRYEFSSHIVRGEHKVG

SEQ ID NO: 20656 - protein, 70 aa, Synthetic construct
LRGTPGPSKEPVKAFKCEHCRILFLDHVMFTIHMGCHGFRDPFECNICGYHSQDRYEFSSHIVRGEHKVG

SEQ ID NO: 20657 - protein, 70 aa, Synthetic construct
LRGTPGPSKEVLRVVKCEHCRILFLDHVMFTIHMGCHGFRDPFECNICGYHSQDRYEFSSHIVRGEHKVG

SEQ ID NO: 20658 - protein, 70 aa, Synthetic construct
LRGTPGPSKEVLRVVGESGEPVKAFKCEHCRILFLDHVMFDPFECNICGYHSQDRYEFSSHIVRGEHKVG

SEQ ID NO: 20659 - protein, 70 aa, Synthetic construct
LRGTPGPSKEVLRVVGESGEPVKAFKCEHCRILFLDHVMFTIHMGCHGFRDPFECNICGYHSQDRYEFSS

SEQ ID NO: 20660 - protein, 70 aa, Synthetic construct
IRYMHTYCLPQRKLPPQTPEPLPKACSNPSQQVRSRPWSRHHSKASWAEFSILRELLAQDVLCDVSKPYR

SEQ ID NO: 20661 - protein, 70 aa, Synthetic construct
QEDMQAMVQLIRYMHTYCLPPLPKACSNPSQQVRSRPWSRHHSKASWAEFSILRELLAQDVLCDVSKPYR

SEQ ID NO: 20662 - protein, 70 aa, Synthetic construct
QEDMQAMVQLIRYMHTYCLPQRKLPCSNPSQQVRSRPWSRHHSKASWAEFSILRELLAQDVLCDVSKPYR

SEQ ID NO: 20663 - protein, 70 aa, Synthetic construct
QEDMQAMVQLIRYMHTYCLPQRKLPPQTPEQQVRSRPWSRHHSKASWAEFSILRELLAQDVLCDVSKPYR

SEQ ID NO: 20664 - protein, 70 aa, Synthetic construct
QEDMQAMVQLIRYMHTYCLPQRKLPPQTPEPLPKARPWSRHHSKASWAEFSILRELLAQDVLCDVSKPYR

SEQ ID NO: 20665 - protein, 70 aa, Synthetic construct
QEDMQAMVQLIRYMHTYCLPQRKLPPQTPEPLPKACSNPSHHSKASWAEFSILRELLAQDVLCDVSKPYR

SEQ ID NO: 20666 - protein, 70 aa, Synthetic construct
QEDMQAMVQLIRYMHTYCLPQRKLPPQTPEPLPKACSNPSQQVRSSWAEFSILRELLAQDVLCDVSKPYR

SEQ ID NO: 20667 - protein, 70 aa, Synthetic construct
QEDMQAMVQLIRYMHTYCLPQRKLPPQTPEPLPKACSNPSQQVRSRPWSRSILRELLAQDVLCDVSKPYR

SEQ ID NO: 20668 - protein, 70 aa, Synthetic construct
QEDMQAMVQLIRYMHTYCLPQRKLPPQTPEPLPKACSNPSQQVRSRPWSRHHSKALLAQDVLCDVSKPYR

SEQ ID NO: 20669 - protein, 70 aa, Synthetic construct
QEDMQAMVQLIRYMHTYCLPQRKLPPQTPEPLPKACSNPSQQVRSRPWSRHHSKASWAEFSILRESKPYR

SEQ ID NO: 20670 - protein, 70 aa, Synthetic construct
SILRELLAQDVLCDVSKPYRLATPVYASLTSQASPGRPSSVEEVRIAASPKSTGPRPSLRPLRLEVKREV

SEQ ID NO: 20671 - protein, 70 aa, Synthetic construct
SILRELLAQDVLCDVSKPYRLATPVYASLTPRSRPGRPSSVEEVRIAASPKSTGPRPSLRPLRLEVKREV

SEQ ID NO: 20672 - protein, 70 aa, Synthetic construct
SILRELLAQDVLCDVSKPYRLATPVYASLTPRSRPRPPKDVEEVRIAASPKSTGPRPSLRPLRLEVKREV

SEQ ID NO: 20673 - protein, 70 aa, Synthetic construct
SILRELLAQDVLCDVSKPYRLATPVYASLTPRSRPRPPKDSQASPIAASPKSTGPRPSLRPLRLEVKREV

SEQ ID NO: 20674 - protein, 70 aa, Synthetic construct
SILRELLAQDVLCDVSKPYRLATPVYASLTPRSRPRPPKDSQASPGRPSSKSTGPRPSLRPLRLEVKREV

SEQ ID NO: 20675 - protein, 70 aa, Synthetic construct
SILRELLAQDVLCDVSKPYRLATPVYASLTPRSRPRPPKDSQASPGRPSSVEEVRRPSLRPLRLEVKREV

SEQ ID NO: 20676 - protein, 70 aa, Synthetic construct
SILRELLAQDVLCDVSKPYRLATPVYASLTPRSRPRPPKDSQASPGRPSSVEEVRIAASPPLRLEVKREV

SEQ ID NO: 20677 - protein, 70 aa, Synthetic construct
SILRELLAQDVLCDVSKPYRLATPVYASLTPRSRPRPPKDSQASPGRPSSVEEVRIAASPKSTGPVKREV

SEQ ID NO: 20678 - protein, 70 aa, Synthetic construct
GPVRKLYDDCSSTIVEDPQTKCEYMLNSMPKRLCLVCGDIASGYHYGVASCEACKAFFKRTIQGNIEYSC

SEQ ID NO: 20679 - protein, 70 aa, Synthetic construct
YPSAPLYDDCSSTIVEDPQTKCEYMLNSMPKRLCLVCGDIASGYHYGVASCEACKAFFKRTIQGNIEYSC

SEQ ID NO: 20680 - protein, 70 aa, Synthetic construct
YPSAPILGGSSSTIVEDPQTKCEYMLNSMPKRLCLVCGDIASGYHYGVASCEACKAFFKRTIQGNIEYSC

SEQ ID NO: 20681 - protein, 70 aa, Synthetic construct
YPSAPILGGSGPVRKEDPQTKCEYMLNSMPKRLCLVCGDIASGYHYGVASCEACKAFFKRTIQGNIEYSC

SEQ ID NO: 20682 - protein, 70 aa, Synthetic construct
YPSAPILGGSGPVRKLYDDCKCEYMLNSMPKRLCLVCGDIASGYHYGVASCEACKAFFKRTIQGNIEYSC

SEQ ID NO: 20683 - protein, 70 aa, Synthetic construct
YPSAPILGGSGPVRKLYDDCSSTIVLNSMPKRLCLVCGDIASGYHYGVASCEACKAFFKRTIQGNIEYSC

SEQ ID NO: 20684 - protein, 70 aa, Synthetic construct
YPSAPILGGSGPVRKLYDDCSSTIVEDPQTKRLCLVCGDIASGYHYGVASCEACKAFFKRTIQGNIEYSC

SEQ ID NO: 20685 - protein, 70 aa, Synthetic construct
YPSAPILGGSGPVRKLYDDCSSTIVEDPQTKCEYMLNSMPASGYHYGVASCEACKAFFKRTIQGNIEYSC

SEQ ID NO: 20686 - protein, 70 aa, Synthetic construct
YPSAPILGGSGPVRKLYDDCSSTIVEDPQTKCEYMLNSMPKRLCLVCGDICEACKAFFKRTIQGNIEYSC

SEQ ID NO: 20687 - protein, 70 aa, Synthetic construct
YPSAPILGGSGPVRKLYDDCSSTIVEDPQTKCEYMLNSMPKRLCLVCGDIASGYHYGVASCEACKIEYSC

SEQ ID NO: 20688 - protein, 70 aa, Synthetic construct
YPSAPILGGSGPVRKLYDDCSSTIVEDPQTKCEYMLNSMPKRLCLVCGDIASGYHYGVASCEACKAFFKR

SEQ ID NO: 20689 - protein, 70 aa, Synthetic construct
LNPHLMCALCGGYFIDATTIVECLHSFCKTCIVRYLETNKYCPMCDVQVHKTRPLLSIRSDKTLQDIVYK

SEQ ID NO: 20690 - protein, 70 aa, Synthetic construct
HRTTRMCALCGGYFIDATTIVECLHSFCKTCIVRYLETNKYCPMCDVQVHKTRPLLSIRSDKTLQDIVYK

SEQ ID NO: 20691 - protein, 70 aa, Synthetic construct
HRTTRIKITEGGYFIDATTIVECLHSFCKTCIVRYLETNKYCPMCDVQVHKTRPLLSIRSDKTLQDIVYK

SEQ ID NO: 20692 - protein, 70 aa, Synthetic construct
HRTTRIKITELNPHLDATTIVECLHSFCKTCIVRYLETNKYCPMCDVQVHKTRPLLSIRSDKTLQDIVYK

SEQ ID NO: 20693 - protein, 70 aa, Synthetic construct
HRTTRIKITELNPHLMCALCVECLHSFCKTCIVRYLETNKYCPMCDVQVHKTRPLLSIRSDKTLQDIVYK

SEQ ID NO: 20694 - protein, 70 aa, Synthetic construct
HRTTRIKITELNPHLMCALCGGYFISFCKTCIVRYLETNKYCPMCDVQVHKTRPLLSIRSDKTLQDIVYK

SEQ ID NO: 20695 - protein, 70 aa, Synthetic construct
HRTTRIKITELNPHLMCALCGGYFIDATTICIVRYLETNKYCPMCDVQVHKTRPLLSIRSDKTLQDIVYK

SEQ ID NO: 20696 - protein, 70 aa, Synthetic construct
HRTTRIKITELNPHLMCALCGGYFIDATTIVECLHLETNKYCPMCDVQVHKTRPLLSIRSDKTLQDIVYK

SEQ ID NO: 20697 - protein, 70 aa, Synthetic construct
HRTTRIKITELNPHLMCALCGGYFIDATTIVECLHSFCKTYCPMCDVQVHKTRPLLSIRSDKTLQDIVYK

SEQ ID NO: 20698 - protein, 70 aa, Synthetic construct
HRTTRIKITELNPHLMCALCGGYFIDATTIVECLHSFCKTCIVRYDVQVHKTRPLLSIRSDKTLQDIVYK

SEQ ID NO: 20699 - protein, 70 aa, Synthetic construct
HRTTRIKITELNPHLMCALCGGYFIDATTIVECLHSFCKTCIVRYLETNKYCPMCLSIRSDKTLQDIVYK

SEQ ID NO: 20700 - protein, 70 aa, Synthetic construct
HRTTRIKITELNPHLMCALCGGYFIDATTIVECLHSFCKTCIVRYLETNKYCPMCDVQVHDKTLQDIVYK

SEQ ID NO: 20701 - protein, 70 aa, Synthetic construct
HRTTRIKITELNPHLMCALCGGYFIDATTIVECLHSFCKTCIVRYLETNKYCPMCDVQVHKTRPLDIVYK

SEQ ID NO: 20702 - protein, 70 aa, Synthetic construct
HRTTRIKITELNPHLMCALCGGYFIDATTIVECLHSFCKTCIVRYLETNKYCPMCDVQVHKTRPLLSIRS

SEQ ID NO: 20703 - protein, 70 aa, Synthetic construct
PMPAGAALLALGPRNPWTLWTPLTPNYPDRQPWTDKHPDLLTCGRCLQTFPLEAITAFMDHKKLGCQLFR

SEQ ID NO: 20704 - protein, 70 aa, Synthetic construct
FGGEPAALLALGPRNPWTLWTPLTPNYPDRQPWTDKHPDLLTCGRCLQTFPLEAITAFMDHKKLGCQLFR

SEQ ID NO: 20705 - protein, 70 aa, Synthetic construct
FGGEPHHSPGLGPRNPWTLWTPLTPNYPDRQPWTDKHPDLLTCGRCLQTFPLEAITAFMDHKKLGCQLFR

SEQ ID NO: 20706 - protein, 70 aa, Synthetic construct
FGGEPHHSPGPMPAGPWTLWTPLTPNYPDRQPWTDKHPDLLTCGRCLQTFPLEAITAFMDHKKLGCQLFR

SEQ ID NO: 20707 - protein, 70 aa, Synthetic construct
FGGEPHHSPGPMPAGAALLATPLTPNYPDRQPWTDKHPDLLTCGRCLQTFPLEAITAFMDHKKLGCQLFR

SEQ ID NO: 20708 - protein, 70 aa, Synthetic construct
FGGEPHHSPGPMPAGAALLALGPRNNYPDRQPWTDKHPDLLTCGRCLQTFPLEAITAFMDHKKLGCQLFR

SEQ ID NO: 20709 - protein, 70 aa, Synthetic construct
FGGEPHHSPGPMPAGAALLALGPRNPWTLWQPWTDKHPDLLTCGRCLQTFPLEAITAFMDHKKLGCQLFR

SEQ ID NO: 20710 - protein, 70 aa, Synthetic construct
FGGEPHHSPGPMPAGAALLALGPRNPWTLWTPLTPKHPDLLTCGRCLQTFPLEAITAFMDHKKLGCQLFR

SEQ ID NO: 20711 - protein, 70 aa, Synthetic construct
FGGEPHHSPGPMPAGAALLALGPRNPWTLWTPLTPNYPDRLTCGRCLQTFPLEAITAFMDHKKLGCQLFR

SEQ ID NO: 20712 - protein, 70 aa, Synthetic construct
FGGEPHHSPGPMPAGAALLALGPRNPWTLWTPLTPNYPDRQPWTDKHPDLLTCGRCLQTFPLEAITAFMD

SEQ ID NO: 20713 - protein, 70 aa, Synthetic construct
GPLKMLPQTPSHLVEDLQDVIKQESDESGIVAEFQENGPPLLKKIKQEVESPTDKSGNFFCSHHWEGDSL

SEQ ID NO: 20714 - protein, 70 aa, Synthetic construct
HALAALPQTPSHLVEDLQDVIKQESDESGIVAEFQENGPPLLKKIKQEVESPTDKSGNFFCSHHWEGDSL

SEQ ID NO: 20715 - protein, 70 aa, Synthetic construct
HALAAQEIKYSHLVEDLQDVIKQESDESGIVAEFQENGPPLLKKIKQEVESPTDKSGNFFCSHHWEGDSL

SEQ ID NO: 20716 - protein, 70 aa, Synthetic construct
HALAAQEIKYGPLKMDLQDVIKQESDESGIVAEFQENGPPLLKKIKQEVESPTDKSGNFFCSHHWEGDSL

SEQ ID NO: 20717 - protein, 70 aa, Synthetic construct
HALAAQEIKYGPLKMLPQTPIKQESDESGIVAEFQENGPPLLKKIKQEVESPTDKSGNFFCSHHWEGDSL

SEQ ID NO: 20718 - protein, 70 aa, Synthetic construct
HALAAQEIKYGPLKMLPQTPSHLVEDESGIVAEFQENGPPLLKKIKQEVESPTDKSGNFFCSHHWEGDSL

SEQ ID NO: 20719 - protein, 70 aa, Synthetic construct
HALAAQEIKYGPLKMLPQTPSHLVEDLQDVVAEFQENGPPLLKKIKQEVESPTDKSGNFFCSHHWEGDSL

SEQ ID NO: 20720 - protein, 70 aa, Synthetic construct
HALAAQEIKYGPLKMLPQTPSHLVEDLQDVIKQESENGPPLLKKIKQEVESPTDKSGNFFCSHHWEGDSL

SEQ ID NO: 20721 - protein, 70 aa, Synthetic construct
HALAAQEIKYGPLKMLPQTPSHLVEDLQDVIKQESDESGILLKKIKQEVESPTDKSGNFFCSHHWEGDSL

SEQ ID NO: 20722 - protein, 70 aa, Synthetic construct
HALAAQEIKYGPLKMLPQTPSHLVEDLQDVIKQESDESGIVAEFQKQEVESPTDKSGNFFCSHHWEGDSL

SEQ ID NO: 20723 - protein, 70 aa, Synthetic construct
HALAAQEIKYGPLKMLPQTPSHLVEDLQDVIKQESDESGIVAEFQENGPPSPTDKSGNFFCSHHWEGDSL

SEQ ID NO: 20724 - protein, 70 aa, Synthetic construct
HALAAQEIKYGPLKMLPQTPSHLVEDLQDVIKQESDESGIVAEFQENGPPLLKKISGNFFCSHHWEGDSL

SEQ ID NO: 20725 - protein, 70 aa, Synthetic construct
HALAAQEIKYGPLKMLPQTPSHLVEDLQDVIKQESDESGIVAEFQENGPPLLKKIKQEVECSHHWEGDSL

SEQ ID NO: 20726 - protein, 70 aa, Synthetic construct
HALAAQEIKYGPLKMLPQTPSHLVEDLQDVIKQESDESGIVAEFQENGPPLLKKIKQEVESPTDKEGDSL

SEQ ID NO: 20727 - protein, 70 aa, Synthetic construct
HALAAQEIKYGPLKMLPQTPSHLVEDLQDVIKQESDESGIVAEFQENGPPLLKKIKQEVESPTDKSGNFF

SEQ ID NO: 20728 - protein, 70 aa, Synthetic construct
AVVVAPPGYVVVQELMVLPAVAAPAVVAIPGPAGSAALTPARQRRRRRARDRPTICGECGKGFSRSTDLV

SEQ ID NO: 20729 - protein, 70 aa, Synthetic construct
GGAAVPGAPAAVVVAMVLPAVAAPAVVAIPGPAGSAALTPARQRRRRRARDRPTICGECGKGFSRSTDLV

SEQ ID NO: 20730 - protein, 70 aa, Synthetic construct
GGAAVPGAPAAVVVAPPGYVVVQELVVAIPGPAGSAALTPARQRRRRRARDRPTICGECGKGFSRSTDLV

SEQ ID NO: 20731 - protein, 70 aa, Synthetic construct
GGAAVPGAPAAVVVAPPGYVVVQELMVLPAVAAPAAALTPARQRRRRRARDRPTICGECGKGFSRSTDLV

SEQ ID NO: 20732 - protein, 70 aa, Synthetic construct
GGAAVPGAPAAVVVAPPGYVVVQELMVLPAVAAPAVVAIPARQRRRRRARDRPTICGECGKGFSRSTDLV

SEQ ID NO: 20733 - protein, 70 aa, Synthetic construct
GGAAVPGAPAAVVVAPPGYVVVQELMVLPAVAAPAVVAIPGPAGSRRRARDRPTICGECGKGFSRSTDLV

SEQ ID NO: 20734 - protein, 70 aa, Synthetic construct
GGAAVPGAPAAVVVAPPGYVVVQELMVLPAVAAPAVVAIPGPAGSAALTPDRPTICGECGKGFSRSTDLV

SEQ ID NO: 20735 - protein, 70 aa, Synthetic construct
GGAAVPGAPAAVVVAPPGYVVVQELMVLPAVAAPAVVAIPGPAGSAALTPARQRRCGECGKGFSRSTDLV

SEQ ID NO: 20736 - protein, 70 aa, Synthetic construct
GGAAVPGAPAAVVVAPPGYVVVQELMVLPAVAAPAVVAIPGPAGSAALTPARQRRRRRARKGFSRSTDLV

SEQ ID NO: 20737 - protein, 70 aa, Synthetic construct
GGAAVPGAPAAVVVAPPGYVVVQELMVLPAVAAPAVVAIPGPAGSAALTPARQRRRRRARDRPTISTDLV

SEQ ID NO: 20738 - protein, 70 aa, Synthetic construct
GGAAVPGAPAAVVVAPPGYVVVQELMVLPAVAAPAVVAIPGPAGSAALTPARQRRRRRARDRPTICGECG

SEQ ID NO: 20739 - protein, 70 aa, Synthetic construct
QLLPPPAPTHHPTVIHINVVTMGPSSVINSVSTSRQNLDTIVQAIQHIEGTQEKQELEEEQRRAVIVKPV

SEQ ID NO: 20740 - protein, 70 aa, Synthetic construct
QLLPPPAPTHHPTVIVPAPPTMGPSSVINSVSTSRQNLDTIVQAIQHIEGTQEKQELEEEQRRAVIVKPV

SEQ ID NO: 20741 - protein, 70 aa, Synthetic construct
QLLPPPAPTHHPTVIVPAPPPPPSHSVINSVSTSRQNLDTIVQAIQHIEGTQEKQELEEEQRRAVIVKPV

SEQ ID NO: 20742 - protein, 70 aa, Synthetic construct
QLLPPPAPTHHPTVIVPAPPPPPSHHINVVVSTSRQNLDTIVQAIQHIEGTQEKQELEEEQRRAVIVKPV

SEQ ID NO: 20743 - protein, 70 aa, Synthetic construct
QLLPPPAPTHHPTVIVPAPPPPPSHHINVVTMGPSSVINSIVQAIQHIEGTQEKQELEEEQRRAVIVKPV

SEQ ID NO: 20744 - protein, 70 aa, Synthetic construct
QLLPPPAPTHHPTVIVPAPPPPPSHHINVVTMGPSSVINSVSTSRQHIEGTQEKQELEEEQRRAVIVKPV

SEQ ID NO: 20745 - protein, 70 aa, Synthetic construct
QLLPPPAPTHHPTVIVPAPPPPPSHHINVVTMGPSSVINSVSTSRQNLDTTQEKQELEEEQRRAVIVKPV

SEQ ID NO: 20746 - protein, 70 aa, Synthetic construct
QLLPPPAPTHHPTVIVPAPPPPPSHHINVVTMGPSSVINSVSTSRQNLDTIVQAIELEEEQRRAVIVKPV

SEQ ID NO: 20747 - protein, 70 aa, Synthetic construct
QLLPPPAPTHHPTVIVPAPPPPPSHHINVVTMGPSSVINSVSTSRQNLDTIVQAIQHIEGQRRAVIVKPV

SEQ ID NO: 20748 - protein, 70 aa, Synthetic construct
QLLPPPAPTHHPTVIVPAPPPPPSHHINVVTMGPSSVINSVSTSRQNLDTIVQAIQHIEGTQEKQIVKPV

SEQ ID NO: 20749 - protein, 70 aa, Synthetic construct
QLLPPPAPTHHPTVIVPAPPPPPSHHINVVTMGPSSVINSVSTSRQNLDTIVQAIQHIEGTQEKQELEEE

SEQ ID NO: 20750 - protein, 70 aa, Synthetic construct
RHHQFLEPAPAPGAAVLSSEPAEPLLVRHPPRPRTTGPRPRQDPHKAGLSHYVKLFSFYAKMPMERKALE

SEQ ID NO: 20751 - protein, 70 aa, Synthetic construct
SSTPESLQARAPGAAVLSSEPAEPLLVRHPPRPRTTGPRPRQDPHKAGLSHYVKLFSFYAKMPMERKALE

SEQ ID NO: 20752 - protein, 70 aa, Synthetic construct
SSTPESLQARRHHQFVLSSEPAEPLLVRHPPRPRTTGPRPRQDPHKAGLSHYVKLFSFYAKMPMERKALE

SEQ ID NO: 20753 - protein, 70 aa, Synthetic construct
SSTPESLQARRHHQFLEPAPPAEPLLVRHPPRPRTTGPRPRQDPHKAGLSHYVKLFSFYAKMPMERKALE

SEQ ID NO: 20754 - protein, 70 aa, Synthetic construct
EARGLQRLLCSGLSWPPGGRASGGGGRAENPQSTGGPAAGAALGLGALRQASGSATPAFEVFQQDYPEEK

SEQ ID NO: 20755 - protein, 70 aa, Synthetic construct
LRRQQAQEESEARGLQRLLCSGLSWPPGGRASGGGGRAENPQSTGGALRQASGSATPAFEVFQQDYPEEK

SEQ ID NO: 20756 - protein, 70 aa, Synthetic construct
RTPPKRKKPRTSFSRSQVLELERRFLRQKYLASAERAALAKALRMTDAQVWRRQTAEEREAERHRAGRLL

SEQ ID NO: 20757 - protein, 70 aa, Synthetic construct
RTPPKRKKPRTSFSRSQVLELERRFLRQKYLASAERAALAKALRMTDAQVKTWFQNRRTKWRRQTAGRLL

SEQ ID NO: 20758 - protein, 70 aa, Synthetic construct
RTPPKRKKPRTSFSRSQVLELERRFLRQKYLASAERAALAKALRMTDAQVKTWFQNRRTKWRRQTAEERE

SEQ ID NO: 20759 - protein, 70 aa, Synthetic construct
NSTFTESSTSDFQMQDTQWERLVASVPALYSDAYDIFQIIELYNLPDENEISSSSFHCLYQYLSPTKYQV

SEQ ID NO: 20760 - protein, 70 aa, Synthetic construct
QPLDPESSTSDFQMQDTQWERLVASVPALYSDAYDIFQIIELYNLPDENEISSSSFHCLYQYLSPTKYQV

SEQ ID NO: 20761 - protein, 70 aa, Synthetic construct
QPLDPSNWAWDFQMQDTQWERLVASVPALYSDAYDIFQIIELYNLPDENEISSSSFHCLYQYLSPTKYQV

SEQ ID NO: 20762 - protein, 70 aa, Synthetic construct
QPLDPSNWAWNSTFTDTQWERLVASVPALYSDAYDIFQIIELYNLPDENEISSSSFHCLYQYLSPTKYQV

SEQ ID NO: 20763 - protein, 70 aa, Synthetic construct
QPLDPSNWAWNSTFTESSTSRLVASVPALYSDAYDIFQIIELYNLPDENEISSSSFHCLYQYLSPTKYQV

SEQ ID NO: 20764 - protein, 70 aa, Synthetic construct
QPLDPSNWAWNSTFTESSTSDFQMQVPALYSDAYDIFQIIELYNLPDENEISSSSFHCLYQYLSPTKYQV

SEQ ID NO: 20765 - protein, 70 aa, Synthetic construct
QPLDPSNWAWNSTFTESSTSDFQMQDTQWESDAYDIFQIIELYNLPDENEISSSSFHCLYQYLSPTKYQV

SEQ ID NO: 20766 - protein, 70 aa, Synthetic construct
QPLDPSNWAWNSTFTESSTSDFQMQDTQWERLVASVPALYELYNLPDENEISSSSFHCLYQYLSPTKYQV

SEQ ID NO: 20767 - protein, 70 aa, Synthetic construct
QPLDPSNWAWNSTFTESSTSDFQMQDTQWERLVASVPALYSDAYDPDENEISSSSFHCLYQYLSPTKYQV

SEQ ID NO: 20768 - protein, 70 aa, Synthetic construct
QPLDPSNWAWNSTFTESSTSDFQMQDTQWERLVASVPALYSDAYDIFQIIELYNLPDENEQYLSPTKYQV

SEQ ID NO: 20769 - protein, 70 aa, Synthetic construct
QPLDPSNWAWNSTFTESSTSDFQMQDTQWERLVASVPALYSDAYDIFQIIELYNLPDENEISSSSTKYQV

SEQ ID NO: 20770 - protein, 70 aa, Synthetic construct
QPLDPSNWAWNSTFTESSTSDFQMQDTQWERLVASVPALYSDAYDIFQIIELYNLPDENEISSSSFHCLY

SEQ ID NO: 20771 - protein, 70 aa, Synthetic construct
NAANARERARMRVLSKAFSRLKTTLPWVPPDTKLSKLDTLRLASSYIAHLRQILANDKYENGYIHPVNLT

SEQ ID NO: 20772 - protein, 70 aa, Synthetic construct
VSQEGRERARMRVLSKAFSRLKTTLPWVPPDTKLSKLDTLRLASSYIAHLRQILANDKYENGYIHPVNLT

SEQ ID NO: 20773 - protein, 70 aa, Synthetic construct
VSQEGKQVQRMRVLSKAFSRLKTTLPWVPPDTKLSKLDTLRLASSYIAHLRQILANDKYENGYIHPVNLT

SEQ ID NO: 20774 - protein, 70 aa, Synthetic construct
VSQEGKQVQRNAANAKAFSRLKTTLPWVPPDTKLSKLDTLRLASSYIAHLRQILANDKYENGYIHPVNLT

SEQ ID NO: 20775 - protein, 70 aa, Synthetic construct
VSQEGKQVQRNAANARERARMRVLSKAFSRLKTTLPWVPPDTKLSKLDTLRLASSYIAHLRQILAPVNLT

SEQ ID NO: 20776 - protein, 70 aa, Synthetic construct
VSQEGKQVQRNAANARERARMRVLSKAFSRLKTTLPWVPPDTKLSKLDTLRLASSYIAHLRQILANDKYE

SEQ ID NO: 20777 - protein, 70 aa, Synthetic construct
AARVSLHRWGGCGPHCRLRGEALVALGQPPHARWAPQQDWHWARRYGLPYVVRVDLRRLAPAPPATPAPA

SEQ ID NO: 20778 - protein, 70 aa, Synthetic construct
RRAPVLHRWGGCGPHCRLRGEALVALGQPPHARWAPQQDWHWARRYGLPYVVRVDLRRLAPAPPATPAPA

SEQ ID NO: 20779 - protein, 70 aa, Synthetic construct
RRAPVLSTHHGCGPHCRLRGEALVALGQPPHARWAPQQDWHWARRYGLPYVVRVDLRRLAPAPPATPAPA

SEQ ID NO: 20780 - protein, 70 aa, Synthetic construct
RRAPVLSTHHAARVSCRLRGEALVALGQPPHARWAPQQDWHWARRYGLPYVVRVDLRRLAPAPPATPAPA

SEQ ID NO: 20781 - protein, 70 aa, Synthetic construct
RRAPVLSTHHAARVSLHRWGEALVALGQPPHARWAPQQDWHWARRYGLPYVVRVDLRRLAPAPPATPAPA

SEQ ID NO: 20782 - protein, 70 aa, Synthetic construct
RRAPVLSTHHAARVSLHRWGGCGPHLGQPPHARWAPQQDWHWARRYGLPYVVRVDLRRLAPAPPATPAPA

SEQ ID NO: 20783 - protein, 70 aa, Synthetic construct
RRAPVLSTHHAARVSLHRWGGCGPHCRLRGHARWAPQQDWHWARRYGLPYVVRVDLRRLAPAPPATPAPA

SEQ ID NO: 20784 - protein, 70 aa, Synthetic construct
RRAPVLSTHHAARVSLHRWGGCGPHCRLRGEALVAPQQDWHWARRYGLPYVVRVDLRRLAPAPPATPAPA

SEQ ID NO: 20785 - protein, 70 aa, Synthetic construct
RRAPVLSTHHAARVSLHRWGGCGPHCRLRGEALVALGQPPHWARRYGLPYVVRVDLRRLAPAPPATPAPA

SEQ ID NO: 20786 - protein, 70 aa, Synthetic construct
RRAPVLSTHHAARVSLHRWGGCGPHCRLRGEALVALGQPPHARWAYGLPYVVRVDLRRLAPAPPATPAPA

SEQ ID NO: 20787 - protein, 70 aa, Synthetic construct
RRAPVLSTHHAARVSLHRWGGCGPHCRLRGEALVALGQPPHARWAPQQDWVVRVDLRRLAPAPPATPAPA

SEQ ID NO: 20788 - protein, 70 aa, Synthetic construct
RRAPVLSTHHAARVSLHRWGGCGPHCRLRGEALVALGQPPHARWAPQQDWHWARRLRRLAPAPPATPAPA

SEQ ID NO: 20789 - protein, 70 aa, Synthetic construct
RRAPVLSTHHAARVSLHRWGGCGPHCRLRGEALVALGQPPHARWAPQQDWHWARRYGLPYPAPPATPAPA

SEQ ID NO: 20790 - protein, 70 aa, Synthetic construct
RRAPVLSTHHAARVSLHRWGGCGPHCRLRGEALVALGQPPHARWAPQQDWHWARRYGLPYVVRVDTPAPA

SEQ ID NO: 20791 - protein, 70 aa, Synthetic construct
RRAPVLSTHHAARVSLHRWGGCGPHCRLRGEALVALGQPPHARWAPQQDWHWARRYGLPYVVRVDLRRLA

SEQ ID NO: 20792 - protein, 70 aa, Synthetic construct
FMIECDICKDWFHGSCVGVEEHHAVDIDLYHCPNCAVLHGSSLMKTEIDDGSKPVQAGTRTFIKELRSRV

SEQ ID NO: 20793 - protein, 70 aa, Synthetic construct
FMIECDICKDWFHGSCVGVEEHHAVDIDLYHCPNCAVLHGSSLMKKRRNWGSKPVQAGTRTFIKELRSRV

SEQ ID NO: 20794 - protein, 70 aa, Synthetic construct
FMIECDICKDWFHGSCVGVEEHHAVDIDLYHCPNCAVLHGSSLMKKRRNWHRHDYQAGTRTFIKELRSRV

SEQ ID NO: 20795 - protein, 70 aa, Synthetic construct
FMIECDICKDWFHGSCVGVEEHHAVDIDLYHCPNCAVLHGSSLMKKRRNWHRHDYTEIDDTFIKELRSRV

SEQ ID NO: 20796 - protein, 70 aa, Synthetic construct
FMIECDICKDWFHGSCVGVEEHHAVDIDLYHCPNCAVLHGSSLMKKRRNWHRHDYTEIDDGSKPVLRSRV

SEQ ID NO: 20797 - protein, 70 aa, Synthetic construct
FMIECDICKDWFHGSCVGVEEHHAVDIDLYHCPNCAVLHGSSLMKKRRNWHRHDYTEIDDGSKPVQAGTR

SEQ ID NO: 20798 - protein, 70 aa, Synthetic construct
QKPSRSEIPIKRECPTSTSTMAGLHYSTCLQRQIQSTDCSGERNSLQDPSSCHGSNHEVRQLYRYDKPVE

SEQ ID NO: 20799 - protein, 70 aa, Synthetic construct
QKPSRSEIPIKRECPTSTSTEEEAIQGMLSMAGLHYSTCLGERNSLQDPSSCHGSNHEVRQLYRYDKPVE

SEQ ID NO: 20800 - protein, 70 aa, Synthetic construct
QKPSRSEIPIKRECPTSTSTEEEAIQGMLSMAGLHYSTCLQRQIQLQDPSSCHGSNHEVRQLYRYDKPVE

SEQ ID NO: 20801 - protein, 70 aa, Synthetic construct
QKPSRSEIPIKRECPTSTSTEEEAIQGMLSMAGLHYSTCLQRQIQSTDCSSCHGSNHEVRQLYRYDKPVE

SEQ ID NO: 20802 - protein, 70 aa, Synthetic construct
QKPSRSEIPIKRECPTSTSTEEEAIQGMLSMAGLHYSTCLQRQIQSTDCSGERNSLQDPSQLYRYDKPVE

SEQ ID NO: 20803 - protein, 70 aa, Synthetic construct
QKPSRSEIPIKRECPTSTSTEEEAIQGMLSMAGLHYSTCLQRQIQSTDCSGERNSLQDPSSCHGSDKPVE

SEQ ID NO: 20804 - protein, 70 aa, Synthetic construct
LNFGASLQQTRPKESMYSWNKTAEKSDFEAVEALMSMSCSWKSDFKKYVENRPVTPVSDLSEEENLLPGT

SEQ ID NO: 20805 - protein, 70 aa, Synthetic construct
LNFGASLQQTAEERMMYSWNKTAEKSDFEAVEALMSMSCSWKSDFKKYVENRPVTPVSDLSEEENLLPGT

SEQ ID NO: 20806 - protein, 70 aa, Synthetic construct
LNFGASLQQTAEERMEMISEKTAEKSDFEAVEALMSMSCSWKSDFKKYVENRPVTPVSDLSEEENLLPGT

SEQ ID NO: 20807 - protein, 70 aa, Synthetic construct
LNFGASLQQTAEERMEMISERPKESMYSWNKTAEKSDFEAVEALMSMSCSWKSDFKKYVESEEENLLPGT

SEQ ID NO: 20808 - protein, 70 aa, Synthetic construct
LNFGASLQQTAEERMEMISERPKESMYSWNKTAEKSDFEAVEALMSMSCSWKSDFKKYVENRPVTLLPGT

SEQ ID NO: 20809 - protein, 70 aa, Synthetic construct
LNFGASLQQTAEERMEMISERPKESMYSWNKTAEKSDFEAVEALMSMSCSWKSDFKKYVENRPVTPVSDL

SEQ ID NO: 20810 - protein, 70 aa, Synthetic construct
APFKEEEKSPVSAPKLPKAQATSVIRHTADAQLCNHQTCPMKAASILNYQNNSFRRRTHLNVEAARKNIP

SEQ ID NO: 20811 - protein, 70 aa, Synthetic construct
LSDTAEEKSPVSAPKLPKAQATSVIRHTADAQLCNHQTCPMKAASILNYQNNSFRRRTHLNVEAARKNIP

SEQ ID NO: 20812 - protein, 70 aa, Synthetic construct
LSDTAKPHIAVSAPKLPKAQATSVIRHTADAQLCNHQTCPMKAASILNYQNNSFRRRTHLNVEAARKNIP

SEQ ID NO: 20813 - protein, 70 aa, Synthetic construct
LSDTAKPHIAAPFKELPKAQATSVIRHTADAQLCNHQTCPMKAASILNYQNNSFRRRTHLNVEAARKNIP

SEQ ID NO: 20814 - protein, 70 aa, Synthetic construct
LSDTAKPHIAAPFKEEEKSPATSVIRHTADAQLCNHQTCPMKAASILNYQNNSFRRRTHLNVEAARKNIP

SEQ ID NO: 20815 - protein, 70 aa, Synthetic construct
LSDTAKPHIAAPFKEEEKSPVSAPKLPKAQATSVIHQTCPMKAASILNYQNNSFRRRTHLNVEAARKNIP

SEQ ID NO: 20816 - protein, 70 aa, Synthetic construct
LSDTAKPHIAAPFKEEEKSPVSAPKLPKAQATSVIRHTADMKAASILNYQNNSFRRRTHLNVEAARKNIP

SEQ ID NO: 20817 - protein, 70 aa, Synthetic construct
LSDTAKPHIAAPFKEEEKSPVSAPKLPKAQATSVIRHTADAQLCNILNYQNNSFRRRTHLNVEAARKNIP

SEQ ID NO: 20818 - protein, 70 aa, Synthetic construct
LSDTAKPHIAAPFKEEEKSPVSAPKLPKAQATSVIRHTADAQLCNHQTCPNNSFRRRTHLNVEAARKNIP

SEQ ID NO: 20819 - protein, 70 aa, Synthetic construct
LSDTAKPHIAAPFKEEEKSPVSAPKLPKAQATSVIRHTADAQLCNHQTCPMKAASRRTHLNVEAARKNIP

SEQ ID NO: 20820 - protein, 70 aa, Synthetic construct
LSDTAKPHIAAPFKEEEKSPVSAPKLPKAQATSVIRHTADAQLCNHQTCPMKAASILNYQNVEAARKNIP

SEQ ID NO: 20821 - protein, 70 aa, Synthetic construct
LSDTAKPHIAAPFKEEEKSPVSAPKLPKAQATSVIRHTADAQLCNHQTCPMKAASILNYQNNSFRRKNIP

SEQ ID NO: 20822 - protein, 70 aa, Synthetic construct
LSDTAKPHIAAPFKEEEKSPVSAPKLPKAQATSVIRHTADAQLCNHQTCPMKAASILNYQNNSFRRRTHL

SEQ ID NO: 20823 - protein, 70 aa, Synthetic construct
RDRTQSVNTAFTALRTLIPTEPVDRKLSKIETVRLASSYIAHLANVLLLGDSADDGQPCFRAAGSAKGAV

SEQ ID NO: 20824 - protein, 70 aa, Synthetic construct
RQRQASVNTAFTALRTLIPTEPVDRKLSKIETVRLASSYIAHLANVLLLGDSADDGQPCFRAAGSAKGAV

SEQ ID NO: 20825 - protein, 70 aa, Synthetic construct
RQRQAANARERDRTQSVNTAFTALRTLIPTEPVDRKLSKIETVRLASSYIAHLANVLLLGDSADDAKGAV

SEQ ID NO: 20826 - protein, 70 aa, Synthetic construct
RQRQAANARERDRTQSVNTAFTALRTLIPTEPVDRKLSKIETVRLASSYIAHLANVLLLGDSADDGQPCF

SEQ ID NO: 20827 - protein, 70 aa, Synthetic construct
AVSLLPPADPLRQANRLPIRVLKMLSAHTGHLLHPEYLQPLSSTPVSPIELDAKKSPLALLAQTCSQIGK

SEQ ID NO: 20828 - protein, 70 aa, Synthetic construct
GGGKRPPADPLRQANRLPIRVLKMLSAHTGHLLHPEYLQPLSSTPVSPIELDAKKSPLALLAQTCSQIGK

SEQ ID NO: 20829 - protein, 70 aa, Synthetic construct
GGGKRPAVPAAVSLLPPADPLRQANRLPIRVLKMLEYLQPLSSTPVSPIELDAKKSPLALLAQTCSQIGK

SEQ ID NO: 20830 - protein, 70 aa, Synthetic construct
GGGKRPAVPAAVSLLPPADPLRQANRLPIRVLKMLSAHTGHLLHPVSPIELDAKKSPLALLAQTCSQIGK

SEQ ID NO: 20831 - protein, 70 aa, Synthetic construct
GGGKRPAVPAAVSLLPPADPLRQANRLPIRVLKMLSAHTGHLLHPEYLQPLDAKKSPLALLAQTCSQIGK

SEQ ID NO: 20832 - protein, 70 aa, Synthetic construct
GGGKRPAVPAAVSLLPPADPLRQANRLPIRVLKMLSAHTGHLLHPEYLQPLSSTPSPLALLAQTCSQIGK

SEQ ID NO: 20833 - protein, 70 aa, Synthetic construct
GGGKRPAVPAAVSLLPPADPLRQANRLPIRVLKMLSAHTGHLLHPEYLQPLSSTPVSPIELAQTCSQIGK

SEQ ID NO: 20834 - protein, 70 aa, Synthetic construct
GGGKRPAVPAAVSLLPPADPLRQANRLPIRVLKMLSAHTGHLLHPEYLQPLSSTPVSPIELDAKKSQIGK

SEQ ID NO: 20835 - protein, 70 aa, Synthetic construct
GGGKRPAVPAAVSLLPPADPLRQANRLPIRVLKMLSAHTGHLLHPEYLQPLSSTPVSPIELDAKKSPLAL

SEQ ID NO: 20836 - protein, 70 aa, Synthetic construct
LERDVLREKVEFLRSLRQMKQKVQSLYQEVFGRLRDENGRPYSPSQYALQYAGDGSVLLIPRTMADQQAR

SEQ ID NO: 20837 - protein, 70 aa, Synthetic construct
LERDVEDLQREFLRSLRQMKQKVQSLYQEVFGRLRDENGRPYSPSQYALQYAGDGSVLLIPRTMADQQAR

SEQ ID NO: 20838 - protein, 70 aa, Synthetic construct
LERDVEDLQRDKARLLREKVQKVQSLYQEVFGRLRDENGRPYSPSQYALQYAGDGSVLLIPRTMADQQAR

SEQ ID NO: 20839 - protein, 70 aa, Synthetic construct
LERDVEDLQRDKARLLREKVEFLRSLYQEVFGRLRDENGRPYSPSQYALQYAGDGSVLLIPRTMADQQAR

SEQ ID NO: 20840 - protein, 70 aa, Synthetic construct
LERDVEDLQRDKARLLREKVEFLRSLRQMKQKVQSLYQEVFGRLRDENGRYAGDGSVLLIPRTMADQQAR

SEQ ID NO: 20841 - protein, 70 aa, Synthetic construct
LERDVEDLQRDKARLLREKVEFLRSLRQMKQKVQSLYQEVFGRLRDENGRPYSPSSVLLIPRTMADQQAR

SEQ ID NO: 20842 - protein, 70 aa, Synthetic construct
LERDVEDLQRDKARLLREKVEFLRSLRQMKQKVQSLYQEVFGRLRDENGRPYSPSQYALQPRTMADQQAR

SEQ ID NO: 20843 - protein, 70 aa, Synthetic construct
LERDVEDLQRDKARLLREKVEFLRSLRQMKQKVQSLYQEVFGRLRDENGRPYSPSQYALQYAGDGDQQAR

SEQ ID NO: 20844 - protein, 70 aa, Synthetic construct
LERDVEDLQRDKARLLREKVEFLRSLRQMKQKVQSLYQEVFGRLRDENGRPYSPSQYALQYAGDGSVLLI

SEQ ID NO: 20845 - protein, 70 aa, Synthetic construct
CVKEEKDFLKKEIVDDTKVKEEPPINHPVGCKRKLAMSRCETCGTEEAKYRCPRCMRYSCSLPCVKKHKA

SEQ ID NO: 20846 - protein, 70 aa, Synthetic construct
CIKEEKDFLKKEIVDDTKVKEEPPINHPVGCKRKLAMSRCETCGTEEAKYRCPRCMRYSCSLPCVKKHKA

SEQ ID NO: 20847 - protein, 70 aa, Synthetic construct
CIKEELMHGEKEIVDDTKVKEEPPINHPVGCKRKLAMSRCETCGTEEAKYRCPRCMRYSCSLPCVKKHKA

SEQ ID NO: 20848 - protein, 70 aa, Synthetic construct
CIKEELMHGECVKEEDTKVKEEPPINHPVGCKRKLAMSRCETCGTEEAKYRCPRCMRYSCSLPCVKKHKA

SEQ ID NO: 20849 - protein, 70 aa, Synthetic construct
CIKEELMHGECVKEEKDFLKEEPPINHPVGCKRKLAMSRCETCGTEEAKYRCPRCMRYSCSLPCVKKHKA

SEQ ID NO: 20850 - protein, 70 aa, Synthetic construct
CIKEELMHGECVKEEKDFLKKEIVDNHPVGCKRKLAMSRCETCGTEEAKYRCPRCMRYSCSLPCVKKHKA

SEQ ID NO: 20851 - protein, 70 aa, Synthetic construct
CIKEELMHGECVKEEKDFLKKEIVDDTKVKCKRKLAMSRCETCGTEEAKYRCPRCMRYSCSLPCVKKHKA

SEQ ID NO: 20852 - protein, 70 aa, Synthetic construct
CIKEELMHGECVKEEKDFLKKEIVDDTKVKEEPPIAMSRCETCGTEEAKYRCPRCMRYSCSLPCVKKHKA

SEQ ID NO: 20853 - protein, 70 aa, Synthetic construct
CIKEELMHGECVKEEKDFLKKEIVDDTKVKEEPPINHPVGETCGTEEAKYRCPRCMRYSCSLPCVKKHKA

SEQ ID NO: 20854 - protein, 70 aa, Synthetic construct
CIKEELMHGECVKEEKDFLKKEIVDDTKVKEEPPINHPVGCKRKLEEAKYRCPRCMRYSCSLPCVKKHKA

SEQ ID NO: 20855 - protein, 70 aa, Synthetic construct
CIKEELMHGECVKEEKDFLKKEIVDDTKVKEEPPINHPVGCKRKLAMSRCRCPRCMRYSCSLPCVKKHKA

SEQ ID NO: 20856 - protein, 70 aa, Synthetic construct
CIKEELMHGECVKEEKDFLKKEIVDDTKVKEEPPINHPVGCKRKLAMSRCETCGTMRYSCSLPCVKKHKA

SEQ ID NO: 20857 - protein, 70 aa, Synthetic construct
CIKEELMHGECVKEEKDFLKKEIVDDTKVKEEPPINHPVGCKRKLAMSRCETCGTEEAKYSLPCVKKHKA

SEQ ID NO: 20858 - protein, 70 aa, Synthetic construct
CIKEELMHGECVKEEKDFLKKEIVDDTKVKEEPPINHPVGCKRKLAMSRCETCGTEEAKYRCPRCKKHKA

SEQ ID NO: 20859 - protein, 70 aa, Synthetic construct
CIKEELMHGECVKEEKDFLKKEIVDDTKVKEEPPINHPVGCKRKLAMSRCETCGTEEAKYRCPRCMRYSC

SEQ ID NO: 20860 - protein, 70 aa, Synthetic construct
LKSPPQLEREPLDLSSKSNRQKLPLPNQRKTPPMPVLTPVHTSSKALLSTVLSRSQRTTQAAGGNVTSCL

SEQ ID NO: 20861 - protein, 70 aa, Synthetic construct
LKSPPQLEREMASPPECSEMPLDLSSKSNRTPPMPVLTPVHTSSKALLSTVLSRSQRTTQAAGGNVTSCL

SEQ ID NO: 20862 - protein, 70 aa, Synthetic construct
LKSPPQLEREMASPPECSEMPLDLSSKSNRQKLPLPNQRKTPPMPVLTPVVLSRSQRTTQAAGGNVTSCL

SEQ ID NO: 20863 - protein, 70 aa, Synthetic construct
LKSPPQLEREMASPPECSEMPLDLSSKSNRQKLPLPNQRKTPPMPVLTPVHTSSKQRTTQAAGGNVTSCL

SEQ ID NO: 20864 - protein, 70 aa, Synthetic construct
LKSPPQLEREMASPPECSEMPLDLSSKSNRQKLPLPNQRKTPPMPVLTPVHTSSKALLSTAAGGNVTSCL

SEQ ID NO: 20865 - protein, 70 aa, Synthetic construct
LKSPPQLEREMASPPECSEMPLDLSSKSNRQKLPLPNQRKTPPMPVLTPVHTSSKALLSTVLSRSVTSCL

SEQ ID NO: 20866 - protein, 70 aa, Synthetic construct
LKSPPQLEREMASPPECSEMPLDLSSKSNRQKLPLPNQRKTPPMPVLTPVHTSSKALLSTVLSRSQRTTQ

SEQ ID NO: 20867 - protein, 70 aa, Synthetic construct
PNNLEEPACLENSEKPSGKRKCKTKHMATVSEEAKDVVLYCLQKDSEDVNHRDNAGYTALHEACSRGWTD

SEQ ID NO: 20868 - protein, 70 aa, Synthetic construct
GISDSEPACLENSEKPSGKRKCKTKHMATVSEEAKDVVLYCLQKDSEDVNHRDNAGYTALHEACSRGWTD

SEQ ID NO: 20869 - protein, 70 aa, Synthetic construct
GISDSPNGFLENSEKPSGKRKCKTKHMATVSEEAKDVVLYCLQKDSEDVNHRDNAGYTALHEACSRGWTD

SEQ ID NO: 20870 - protein, 70 aa, Synthetic construct
GISDSPNGFLPNNLEEPACLENSEKPSGKRKCKTKHMATVCLQKDSEDVNHRDNAGYTALHEACSRGWTD

SEQ ID NO: 20871 - protein, 70 aa, Synthetic construct
GISDSPNGFLPNNLEEPACLENSEKPSGKRKCKTKHMATVSEEAKDVVLYHRDNAGYTALHEACSRGWTD

SEQ ID NO: 20872 - protein, 70 aa, Synthetic construct
GISDSPNGFLPNNLEEPACLENSEKPSGKRKCKTKHMATVSEEAKDVVLYCLQKDGYTALHEACSRGWTD

SEQ ID NO: 20873 - protein, 70 aa, Synthetic construct
GISDSPNGFLPNNLEEPACLENSEKPSGKRKCKTKHMATVSEEAKDVVLYCLQKDSEDVNHEACSRGWTD

SEQ ID NO: 20874 - protein, 70 aa, Synthetic construct
GISDSPNGFLPNNLEEPACLENSEKPSGKRKCKTKHMATVSEEAKDVVLYCLQKDSEDVNHRDNARGWTD

SEQ ID NO: 20875 - protein, 70 aa, Synthetic construct
GISDSPNGFLPNNLEEPACLENSEKPSGKRKCKTKHMATVSEEAKDVVLYCLQKDSEDVNHRDNAGYTAL

SEQ ID NO: 20876 - protein, 70 aa, Synthetic construct
DPVACEDVAVNFTQEKLYREVMLETFRNLTSIGKKWKDQNIEYEYQNPRRNFRSLIEGNVNEIKEDSHCG

SEQ ID NO: 20877 - protein, 70 aa, Synthetic construct
DPVACEDVAVNFTQEEWALLDISQRKLYREVMLETFRNLTIEYEYQNPRRNFRSLIEGNVNEIKEDSHCG

SEQ ID NO: 20878 - protein, 70 aa, Synthetic construct
DPVACEDVAVNFTQEEWALLDISQRKLYREVMLETFRNLTSIGKKQNPRRNFRSLIEGNVNEIKEDSHCG

SEQ ID NO: 20879 - protein, 70 aa, Synthetic construct
DPVACEDVAVNFTQEEWALLDISQRKLYREVMLETFRNLTSIGKKWKDQNIEYEYIEGNVNEIKEDSHCG

SEQ ID NO: 20880 - protein, 70 aa, Synthetic construct
DPVACEDVAVNFTQEEWALLDISQRKLYREVMLETFRNLTSIGKKWKDQNIEYEYQNPRRNEIKEDSHCG

SEQ ID NO: 20881 - protein, 70 aa, Synthetic construct
DPVACEDVAVNFTQEEWALLDISQRKLYREVMLETFRNLTSIGKKWKDQNIEYEYQNPRRNFRSLDSHCG

SEQ ID NO: 20882 - protein, 70 aa, Synthetic construct
DPVACEDVAVNFTQEEWALLDISQRKLYREVMLETFRNLTSIGKKWKDQNIEYEYQNPRRNFRSLIEGNV

SEQ ID NO: 20883 - protein, 70 aa, Synthetic construct
TRKSREEELGELEAKLNENLRRNIERINNEIDQLMNQMQQIETQQRKFKASRDSILSEMKMLKEKRQQSE

SEQ ID NO: 20884 - protein, 70 aa, Synthetic construct
TRKSRLELQKELEAKLNENLRRNIERINNEIDQLMNQMQQIETQQRKFKASRDSILSEMKMLKEKRQQSE

SEQ ID NO: 20885 - protein, 70 aa, Synthetic construct
TRKSRLELQKDVRKALNENLRRNIERINNEIDQLMNQMQQIETQQRKFKASRDSILSEMKMLKEKRQQSE

SEQ ID NO: 20886 - protein, 70 aa, Synthetic construct
TRKSRLELQKDVRKAEEELGELEAKLNENLRRNIERINNEIDQLMNQMQQIETQQRKFKAMLKEKRQQSE

SEQ ID NO: 20887 - protein, 70 aa, Synthetic construct
DTKASFEAHVREKFNRMVEAVDRTIEKRIDKLTKELAQKTAELLEVRAAFVQLTQKKQEVQRRERALNRQ

SEQ ID NO: 20888 - protein, 70 aa, Synthetic construct
TRSGPGLPTSDTKASRMVEAVDRTIEKRIDKLTKELAQKTAELLEVRAAFVQLTQKKQEVQRRERALNRQ

SEQ ID NO: 20889 - protein, 70 aa, Synthetic construct
TRSGPGLPTSDTKASFEAHVREKFNRMVEAVDRTIEKRIDKLTKELAQKTAELLEKKQEVQRRERALNRQ

SEQ ID NO: 20890 - protein, 70 aa, Synthetic construct
TRSGPGLPTSDTKASFEAHVREKFNRMVEAVDRTIEKRIDKLTKELAQKTAELLEVRAAFVQLTQALNRQ

SEQ ID NO: 20891 - protein, 70 aa, Synthetic construct
TRSGPGLPTSDTKASFEAHVREKFNRMVEAVDRTIEKRIDKLTKELAQKTAELLEVRAAFVQLTQKKQEV

SEQ ID NO: 20892 - protein, 70 aa, Synthetic construct
QDFIENLLQRVELAEKQLEYYQSQQASGFVISSNRKPKCLSRGHPHSVCNHPDLKAHFHPKGRNHLKKAK

SEQ ID NO: 20893 - protein, 70 aa, Synthetic construct
QDFIENLLQRVELAEKQLEYYQSQQASGFVRDLSGKPKCLSRGHPHSVCNHPDLKAHFHPKGRNHLKKAK

SEQ ID NO: 20894 - protein, 70 aa, Synthetic construct
QDFIENLLQRVELAEKQLEYYQSQQASGFVRDLSGHVLTDSRGHPHSVCNHPDLKAHFHPKGRNHLKKAK

SEQ ID NO: 20895 - protein, 70 aa, Synthetic construct
QDFIENLLQRVELAEKQLEYYQSQQASGFVRDLSGHVLTDISSNRHSVCNHPDLKAHFHPKGRNHLKKAK

SEQ ID NO: 20896 - protein, 70 aa, Synthetic construct
QDFIENLLQRVELAEKQLEYYQSQQASGFVRDLSGHVLTDISSNRKPKCLHPDLKAHFHPKGRNHLKKAK

SEQ ID NO: 20897 - protein, 70 aa, Synthetic construct
QDFIENLLQRVELAEKQLEYYQSQQASGFVRDLSGHVLTDISSNRKPKCLSRGHPAHFHPKGRNHLKKAK

SEQ ID NO: 20898 - protein, 70 aa, Synthetic construct
QDFIENLLQRVELAEKQLEYYQSQQASGFVRDLSGHVLTDISSNRKPKCLSRGHPHSVCNKGRNHLKKAK

SEQ ID NO: 20899 - protein, 70 aa, Synthetic construct
QDFIENLLQRVELAEKQLEYYQSQQASGFVRDLSGHVLTDISSNRKPKCLSRGHPHSVCNHPDLKLKKAK

SEQ ID NO: 20900 - protein, 70 aa, Synthetic construct
QDFIENLLQRVELAEKQLEYYQSQQASGFVRDLSGHVLTDISSNRKPKCLSRGHPHSVCNHPDLKAHFHP

SEQ ID NO: 20901 - protein, 70 aa, Synthetic construct
VASEDSKLAVSLAETTGLIKLEEEQKEQLFFVETMSGDERSDEIVLTVSNSNVEEQEDQPTAGQADAEKA

SEQ ID NO: 20902 - protein, 70 aa, Synthetic construct
VASEDSKLAVSLAETTGLIKLEEEQEKNQLLAERTKEQLFFVETMSGDERSDEIVLTVSNTAGQADAEKA

SEQ ID NO: 20903 - protein, 70 aa, Synthetic construct
VLIDPLAANGTTDMHTSVPRVKGGQRNITDDSRGQPFIKKMHFTIRLTESAITYRDIVVKKEDGFTQIVL

SEQ ID NO: 20904 - protein, 70 aa, Synthetic construct
TGSATLAANGTTDMHTSVPRVKGGQRNITDDSRGQPFIKKMHFTIRLTESAITYRDIVVKKEDGFTQIVL

SEQ ID NO: 20905 - protein, 70 aa, Synthetic construct
TGSATRKGIVTTDMHTSVPRVKGGQRNITDDSRGQPFIKKMHFTIRLTESAITYRDIVVKKEDGFTQIVL

SEQ ID NO: 20906 - protein, 70 aa, Synthetic construct
TGSATRKGIVVLIDPTSVPRVKGGQRNITDDSRGQPFIKKMHFTIRLTESAITYRDIVVKKEDGFTQIVL

SEQ ID NO: 20907 - protein, 70 aa, Synthetic construct
TGSATRKGIVVLIDPLAANGVKGGQRNITDDSRGQPFIKKMHFTIRLTESAITYRDIVVKKEDGFTQIVL

SEQ ID NO: 20908 - protein, 70 aa, Synthetic construct
TGSATRKGIVVLIDPLAANGTTDMHRNITDDSRGQPFIKKMHFTIRLTESAITYRDIVVKKEDGFTQIVL

SEQ ID NO: 20909 - protein, 70 aa, Synthetic construct
TGSATRKGIVVLIDPLAANGTTDMHTSVPRDSRGQPFIKKMHFTIRLTESAITYRDIVVKKEDGFTQIVL

SEQ ID NO: 20910 - protein, 70 aa, Synthetic construct
TGSATRKGIVVLIDPLAANGTTDMHTSVPRVKGGQPFIKKMHFTIRLTESAITYRDIVVKKEDGFTQIVL

SEQ ID NO: 20911 - protein, 70 aa, Synthetic construct
TGSATRKGIVVLIDPLAANGTTDMHTSVPRVKGGQRNITDMHFTIRLTESAITYRDIVVKKEDGFTQIVL

SEQ ID NO: 20912 - protein, 70 aa, Synthetic construct
TGSATRKGIVVLIDPLAANGTTDMHTSVPRVKGGQRNITDDSRGQRLTESAITYRDIVVKKEDGFTQIVL

SEQ ID NO: 20913 - protein, 70 aa, Synthetic construct
TGSATRKGIVVLIDPLAANGTTDMHTSVPRVKGGQRNITDDSRGQPFIKKMHFTIDIVVKKEDGFTQIVL

SEQ ID NO: 20914 - protein, 70 aa, Synthetic construct
TGSATRKGIVVLIDPLAANGTTDMHTSVPRVKGGQRNITDDSRGQPFIKKMHFTIRLTESKEDGFTQIVL

SEQ ID NO: 20915 - protein, 70 aa, Synthetic construct
TGSATRKGIVVLIDPLAANGTTDMHTSVPRVKGGQRNITDDSRGQPFIKKMHFTIRLTESAITYRDIVVK

SEQ ID NO: 20916 - protein, 70 aa, Synthetic construct
RKREFIPDEKKDAMYWEKRRKNNEAAKRSREKRRLNDLVLENKLIALGEENATLKAELLSLKLKFGLISS

SEQ ID NO: 20917 - protein, 70 aa, Synthetic construct
SSSCISVIKHSPQSSLSDVSEVSSVEHTQESSVQGSCRSPENKFQIIKQEPMELESYTREPRDDRGSYTA

SEQ ID NO: 20918 - protein, 70 aa, Synthetic construct
FVDEHSVIKHSPQSSLSDVSEVSSVEHTQESSVQGSCRSPENKFQIIKQEPMELESYTREPRDDRGSYTA

SEQ ID NO: 20919 - protein, 70 aa, Synthetic construct
FVDEHEPSMVSSSCILSDVSEVSSVEHTQESSVQGSCRSPENKFQIIKQEPMELESYTREPRDDRGSYTA

SEQ ID NO: 20920 - protein, 70 aa, Synthetic construct
FVDEHEPSMVSSSCISVIKHEVSSVEHTQESSVQGSCRSPENKFQIIKQEPMELESYTREPRDDRGSYTA

SEQ ID NO: 20921 - protein, 70 aa, Synthetic construct
FVDEHEPSMVSSSCISVIKHSPQSSEHTQESSVQGSCRSPENKFQIIKQEPMELESYTREPRDDRGSYTA

SEQ ID NO: 20922 - protein, 70 aa, Synthetic construct
FVDEHEPSMVSSSCISVIKHSPQSSLSDVSSSVQGSCRSPENKFQIIKQEPMELESYTREPRDDRGSYTA

SEQ ID NO: 20923 - protein, 70 aa, Synthetic construct
FVDEHEPSMVSSSCISVIKHSPQSSLSDVSEVSSVSCRSPENKFQIIKQEPMELESYTREPRDDRGSYTA

SEQ ID NO: 20924 - protein, 70 aa, Synthetic construct
FVDEHEPSMVSSSCISVIKHSPQSSLSDVSEVSSVEHTQEENKFQIIKQEPMELESYTREPRDDRGSYTA

SEQ ID NO: 20925 - protein, 70 aa, Synthetic construct
FVDEHEPSMVSSSCISVIKHSPQSSLSDVSEVSSVEHTQESSVQGIIKQEPMELESYTREPRDDRGSYTA

SEQ ID NO: 20926 - protein, 70 aa, Synthetic construct
FVDEHEPSMVSSSCISVIKHSPQSSLSDVSEVSSVEHTQESSVQGSCRSPENKFQIIKQEPRDDRGSYTA

SEQ ID NO: 20927 - protein, 70 aa, Synthetic construct
FVDEHEPSMVSSSCISVIKHSPQSSLSDVSEVSSVEHTQESSVQGSCRSPENKFQIIKQEPMELEGSYTA

SEQ ID NO: 20928 - protein, 70 aa, Synthetic construct
FVDEHEPSMVSSSCISVIKHSPQSSLSDVSEVSSVEHTQESSVQGSCRSPENKFQIIKQEPMELESYTRE

SEQ ID NO: 20929 - protein, 70 aa, Synthetic construct
PRTSETDDGVVGKSSDGEDEQQVPKGPIHSPVELKHVHATVVKVPEVNSSALPHKLRIKAKAMQIKVEAF

SEQ ID NO: 20930 - protein, 70 aa, Synthetic construct
LQVNRTDDGVVGKSSDGEDEQQVPKGPIHSPVELKHVHATVVKVPEVNSSALPHKLRIKAKAMQIKVEAF

SEQ ID NO: 20931 - protein, 70 aa, Synthetic construct
LQVNRSSSNSVGKSSDGEDEQQVPKGPIHSPVELKHVHATVVKVPEVNSSALPHKLRIKAKAMQIKVEAF

SEQ ID NO: 20932 - protein, 70 aa, Synthetic construct
LQVNRSSSNSPRTSEDGEDEQQVPKGPIHSPVELKHVHATVVKVPEVNSSALPHKLRIKAKAMQIKVEAF

SEQ ID NO: 20933 - protein, 70 aa, Synthetic construct
LQVNRSSSNSPRTSETDDGVQQVPKGPIHSPVELKHVHATVVKVPEVNSSALPHKLRIKAKAMQIKVEAF

SEQ ID NO: 20934 - protein, 70 aa, Synthetic construct
LQVNRSSSNSPRTSETDDGVVGKSSGPIHSPVELKHVHATVVKVPEVNSSALPHKLRIKAKAMQIKVEAF

SEQ ID NO: 20935 - protein, 70 aa, Synthetic construct
LQVNRSSSNSPRTSETDDGVVGKSSDGEDEPVELKHVHATVVKVPEVNSSALPHKLRIKAKAMQIKVEAF

SEQ ID NO: 20936 - protein, 70 aa, Synthetic construct
LQVNRSSSNSPRTSETDDGVVGKSSDGEDEQQVPKHVHATVVKVPEVNSSALPHKLRIKAKAMQIKVEAF

SEQ ID NO: 20937 - protein, 70 aa, Synthetic construct
LQVNRSSSNSPRTSETDDGVVGKSSDGEDEQQVPKGPIHSVVKVPEVNSSALPHKLRIKAKAMQIKVEAF

SEQ ID NO: 20938 - protein, 70 aa, Synthetic construct
LQVNRSSSNSPRTSETDDGVVGKSSDGEDEQQVPKGPIHSPVELKEVNSSALPHKLRIKAKAMQIKVEAF

SEQ ID NO: 20939 - protein, 70 aa, Synthetic construct
LQVNRSSSNSPRTSETDDGVVGKSSDGEDEQQVPKGPIHSPVELKHVHATALPHKLRIKAKAMQIKVEAF

SEQ ID NO: 20940 - protein, 70 aa, Synthetic construct
IENKPLQEQLSVNQIKTEPVDYEFKPIVVASGINCSTPLQNGVFTGGGPLQATSSPQGMVQAVVLPTVGL

SEQ ID NO: 20941 - protein, 70 aa, Synthetic construct
SPTRPLQEQLSVNQIKTEPVDYEFKPIVVASGINCSTPLQNGVFTGGGPLQATSSPQGMVQAVVLPTVGL

SEQ ID NO: 20942 - protein, 70 aa, Synthetic construct
SPTRPQIRQKSVNQIKTEPVDYEFKPIVVASGINCSTPLQNGVFTGGGPLQATSSPQGMVQAVVLPTVGL

SEQ ID NO: 20943 - protein, 70 aa, Synthetic construct
SPTRPQIRQKIENKPKTEPVDYEFKPIVVASGINCSTPLQNGVFTGGGPLQATSSPQGMVQAVVLPTVGL

SEQ ID NO: 20944 - protein, 70 aa, Synthetic construct
SPTRPQIRQKIENKPLQEQLSVNQIKTEPVSGINCSTPLQNGVFTGGGPLQATSSPQGMVQAVVLPTVGL

SEQ ID NO: 20945 - protein, 70 aa, Synthetic construct
SPTRPQIRQKIENKPLQEQLSVNQIKTEPVDYEFKSTPLQNGVFTGGGPLQATSSPQGMVQAVVLPTVGL

SEQ ID NO: 20946 - protein, 70 aa, Synthetic construct
SPTRPQIRQKIENKPLQEQLSVNQIKTEPVDYEFKPIVVANGVFTGGGPLQATSSPQGMVQAVVLPTVGL

SEQ ID NO: 20947 - protein, 70 aa, Synthetic construct
SPTRPQIRQKIENKPLQEQLSVNQIKTEPVDYEFKPIVVASGINCGGGPLQATSSPQGMVQAVVLPTVGL

SEQ ID NO: 20948 - protein, 70 aa, Synthetic construct
SPTRPQIRQKIENKPLQEQLSVNQIKTEPVDYEFKPIVVASGINCSTPLQQATSSPQGMVQAVVLPTVGL

SEQ ID NO: 20949 - protein, 70 aa, Synthetic construct
SPTRPQIRQKIENKPLQEQLSVNQIKTEPVDYEFKPIVVASGINCSTPLQNGVFTPQGMVQAVVLPTVGL

SEQ ID NO: 20950 - protein, 70 aa, Synthetic construct
SPTRPQIRQKIENKPLQEQLSVNQIKTEPVDYEFKPIVVASGINCSTPLQNGVFTGGGPLQAVVLPTVGL

SEQ ID NO: 20951 - protein, 70 aa, Synthetic construct
SPTRPQIRQKIENKPLQEQLSVNQIKTEPVDYEFKPIVVASGINCSTPLQNGVFTGGGPLQATSSPTVGL

SEQ ID NO: 20952 - protein, 70 aa, Synthetic construct
SPTRPQIRQKIENKPLQEQLSVNQIKTEPVDYEFKPIVVASGINCSTPLQNGVFTGGGPLQATSSPQGMV

SEQ ID NO: 20953 - protein, 70 aa, Synthetic construct
DSTVNPVLPVGSTTNGSRSSTPSPSPLNLSSSRNTQGYLYTAEGAQEEPQVEPLDLSLPKQQGELLERST

SEQ ID NO: 20954 - protein, 70 aa, Synthetic construct
DSTVNLQSPLKMTNSGSRSSTPSPSPLNLSSSRNTQGYLYTAEGAQEEPQVEPLDLSLPKQQGELLERST

SEQ ID NO: 20955 - protein, 70 aa, Synthetic construct
DSTVNLQSPLKMTNSPVLPVGSTTNPLNLSSSRNTQGYLYTAEGAQEEPQVEPLDLSLPKQQGELLERST

SEQ ID NO: 20956 - protein, 70 aa, Synthetic construct
DSTVNLQSPLKMTNSPVLPVGSTTNGSRSSSSRNTQGYLYTAEGAQEEPQVEPLDLSLPKQQGELLERST

SEQ ID NO: 20957 - protein, 70 aa, Synthetic construct
DSTVNLQSPLKMTNSPVLPVGSTTNGSRSSTPSPSQGYLYTAEGAQEEPQVEPLDLSLPKQQGELLERST

SEQ ID NO: 20958 - protein, 70 aa, Synthetic construct
DSTVNLQSPLKMTNSPVLPVGSTTNGSRSSTPSPSPLNLSSSRNTQGYLYTAEGAQEEPQVEPLDLSLPK

SEQ ID NO: 20959 - protein, 70 aa, Synthetic construct
VEPLDLSLPKQQGELLERSTITSVYQNSVYSVQEEPLNLSCAKKEPQKDSCVTDSEPVVNVIPPSANPIN

SEQ ID NO: 20960 - protein, 70 aa, Synthetic construct
TAEGAQEEPQQQGELLERSTITSVYQNSVYSVQEEPLNLSCAKKEPQKDSCVTDSEPVVNVIPPSANPIN

SEQ ID NO: 20961 - protein, 70 aa, Synthetic construct
TAEGAQEEPQVEPLDLSLPKITSVYQNSVYSVQEEPLNLSCAKKEPQKDSCVTDSEPVVNVIPPSANPIN

SEQ ID NO: 20962 - protein, 70 aa, Synthetic construct
TAEGAQEEPQVEPLDLSLPKQQGELQNSVYSVQEEPLNLSCAKKEPQKDSCVTDSEPVVNVIPPSANPIN

SEQ ID NO: 20963 - protein, 70 aa, Synthetic construct
TAEGAQEEPQVEPLDLSLPKQQGELLERSTSVQEEPLNLSCAKKEPQKDSCVTDSEPVVNVIPPSANPIN

SEQ ID NO: 20964 - protein, 70 aa, Synthetic construct
TAEGAQEEPQVEPLDLSLPKQQGELLERSTITSVYPLNLSCAKKEPQKDSCVTDSEPVVNVIPPSANPIN

SEQ ID NO: 20965 - protein, 70 aa, Synthetic construct
TAEGAQEEPQVEPLDLSLPKQQGELLERSTITSVYQNSVYCAKKEPQKDSCVTDSEPVVNVIPPSANPIN

SEQ ID NO: 20966 - protein, 70 aa, Synthetic construct
TAEGAQEEPQVEPLDLSLPKQQGELLERSTITSVYQNSVYSVQEEPQKDSCVTDSEPVVNVIPPSANPIN

SEQ ID NO: 20967 - protein, 70 aa, Synthetic construct
TAEGAQEEPQVEPLDLSLPKQQGELLERSTITSVYQNSVYSVQEEPLNLSCAKKEEPVVNVIPPSANPIN

SEQ ID NO: 20968 - protein, 70 aa, Synthetic construct
TAEGAQEEPQVEPLDLSLPKQQGELLERSTITSVYQNSVYSVQEEPLNLSCAKKEPQKDSVIPPSANPIN

SEQ ID NO: 20969 - protein, 70 aa, Synthetic construct
TAEGAQEEPQVEPLDLSLPKQQGELLERSTITSVYQNSVYSVQEEPLNLSCAKKEPQKDSCVTDSANPIN

SEQ ID NO: 20970 - protein, 70 aa, Synthetic construct
TAEGAQEEPQVEPLDLSLPKQQGELLERSTITSVYQNSVYSVQEEPLNLSCAKKEPQKDSCVTDSEPVVN

SEQ ID NO: 20971 - protein, 70 aa, Synthetic construct
PQAMSQPNRGPSPFSPVQLHQLRAQILAYKMLARGQPLPETLQLAVQGKRTLPGLQQQQQQQQQQQQQQQ

SEQ ID NO: 20972 - protein, 70 aa, Synthetic construct
SQPGAQPNRGPSPFSPVQLHQLRAQILAYKMLARGQPLPETLQLAVQGKRTLPGLQQQQQQQQQQQQQQQ

SEQ ID NO: 20973 - protein, 70 aa, Synthetic construct
SQPGALIPGDPSPFSPVQLHQLRAQILAYKMLARGQPLPETLQLAVQGKRTLPGLQQQQQQQQQQQQQQQ

SEQ ID NO: 20974 - protein, 70 aa, Synthetic construct
SQPGALIPGDPQAMSPVQLHQLRAQILAYKMLARGQPLPETLQLAVQGKRTLPGLQQQQQQQQQQQQQQQ

SEQ ID NO: 20975 - protein, 70 aa, Synthetic construct
SQPGALIPGDPQAMSQPNRGPSPFSPVQLHQLRAQILAYKMLARGVQGKRTLPGLQQQQQQQQQQQQQQQ

SEQ ID NO: 20976 - protein, 70 aa, Synthetic construct
SQPGALIPGDPQAMSQPNRGPSPFSPVQLHQLRAQILAYKMLARGQPLPETLQLAVQGKRQQQQQQQQQQ

SEQ ID NO: 20977 - protein, 70 aa, Synthetic construct
SQPGALIPGDPQAMSQPNRGPSPFSPVQLHQLRAQILAYKMLARGQPLPETLQLAVQGKRTLPGLQQQQQ

SEQ ID NO: 20978 - protein, 70 aa, Synthetic construct; identical to SEQ ID NO: 20977

SEQ ID NO: 20979 - protein, 70 aa, Synthetic construct
YIKAESETETEPPVALAPGPAPTRCLPGHKEEEDGEGAGPGEQGGGKLVLSSLPKRLCLVCGDVASGYHY

SEQ ID NO: 20980 - protein, 70 aa, Synthetic construct
YIKAEPASPDEPPVALAPGPAPTRCLPGHKEEEDGEGAGPGEQGGGKLVLSSLPKRLCLVCGDVASGYHY

SEQ ID NO: 20981 - protein, 70 aa, Synthetic construct
YIKAEPASPDSPKGSLAPGPAPTRCLPGHKEEEDGEGAGPGEQGGGKLVLSSLPKRLCLVCGDVASGYHY

SEQ ID NO: 20982 - protein, 70 aa, Synthetic construct
YIKAEPASPDSPKGSSETETAPTRCLPGHKEEEDGEGAGPGEQGGGKLVLSSLPKRLCLVCGDVASGYHY

SEQ ID NO: 20983 - protein, 70 aa, Synthetic construct
YIKAEPASPDSPKGSSETETEPPVALPGHKEEEDGEGAGPGEQGGGKLVLSSLPKRLCLVCGDVASGYHY

SEQ ID NO: 20984 - protein, 70 aa, Synthetic construct
YIKAEPASPDSPKGSSETETEPPVALAPGPEEEDGEGAGPGEQGGGKLVLSSLPKRLCLVCGDVASGYHY

SEQ ID NO: 20985 - protein, 70 aa, Synthetic construct
YIKAEPASPDSPKGSSETETEPPVALAPGPAPTRCEGAGPGEQGGGKLVLSSLPKRLCLVCGDVASGYHY

SEQ ID NO: 20986 - protein, 70 aa, Synthetic construct
YIKAEPASPDSPKGSSETETEPPVALAPGPAPTRCLPGHKGEQGGGKLVLSSLPKRLCLVCGDVASGYHY

SEQ ID NO: 20987 - protein, 70 aa, Synthetic construct
YIKAEPASPDSPKGSSETETEPPVALAPGPAPTRCLPGHKEEEDGGKLVLSSLPKRLCLVCGDVASGYHY

SEQ ID NO: 20988 - protein, 70 aa, Synthetic construct
YIKAEPASPDSPKGSSETETEPPVALAPGPAPTRCLPGHKEEEDGEGAGPSSLPKRLCLVCGDVASGYHY

SEQ ID NO: 20989 - protein, 70 aa, Synthetic construct
YIKAEPASPDSPKGSSETETEPPVALAPGPAPTRCLPGHKEEEDGEGAGPGEQGGRLCLVCGDVASGYHY

SEQ ID NO: 20990 - protein, 70 aa, Synthetic construct
YIKAEPASPDSPKGSSETETEPPVALAPGPAPTRCLPGHKEEEDGEGAGPGEQGGGKLVLCGDVASGYHY

SEQ ID NO: 20991 - protein, 70 aa, Synthetic construct
YIKAEPASPDSPKGSSETETEPPVALAPGPAPTRCLPGHKEEEDGEGAGPGEQGGGKLVLSSLPKSGYHY

SEQ ID NO: 20992 - protein, 70 aa, Synthetic construct
YIKAEPASPDSPKGSSETETEPPVALAPGPAPTRCLPGHKEEEDGEGAGPGEQGGGKLVLSSLPKRLCLV

SEQ ID NO: 20993 - protein, 70 aa, Synthetic construct
EEEDGEGAGPGEQGGGKLVLSSLPKRLCLVCGDVASGYHYGVASCEACKAFFKRTIQGSIEYSCPASNEC

SEQ ID NO: 20994 - protein, 70 aa, Synthetic construct
APTRCEGAGPGEQGGGKLVLSSLPKRLCLVCGDVASGYHYGVASCEACKAFFKRTIQGSIEYSCPASNEC

SEQ ID NO: 20995 - protein, 70 aa, Synthetic construct
APTRCLPGHKGEQGGGKLVLSSLPKRLCLVCGDVASGYHYGVASCEACKAFFKRTIQGSIEYSCPASNEC

SEQ ID NO: 20996 - protein, 70 aa, Synthetic construct
APTRCLPGHKEEEDGGKLVLSSLPKRLCLVCGDVASGYHYGVASCEACKAFFKRTIQGSIEYSCPASNEC

SEQ ID NO: 20997 - protein, 70 aa, Synthetic construct
APTRCLPGHKEEEDGEGAGPSSLPKRLCLVCGDVASGYHYGVASCEACKAFFKRTIQGSIEYSCPASNEC

SEQ ID NO: 20998 - protein, 70 aa, Synthetic construct
APTRCLPGHKEEEDGEGAGPGEQGGRLCLVCGDVASGYHYGVASCEACKAFFKRTIQGSIEYSCPASNEC

SEQ ID NO: 20999 - protein, 70 aa, Synthetic construct
APTRCLPGHKEEEDGEGAGPGEQGGGKLVLSSLPKRLCLVCGDVAEACKAFFKRTIQGSIEYSCPASNEC

SEQ ID NO: 21000 - protein, 70 aa, Synthetic construct
APTRCLPGHKEEEDGEGAGPGEQGGGKLVLSSLPKRLCLVCGDVASGYHYGVASCEACKAFFKRTASNEC

SEQ ID NO: 21001 - protein, 70 aa, Synthetic construct
APTRCLPGHKEEEDGEGAGPGEQGGGKLVLSSLPKRLCLVCGDVASGYHYGVASCEACKAFFKRTIQGSI

SEQ ID NO: 21002 - protein, 70 aa, Synthetic construct
VRTKTLVKNCIVLIDHYALPLGRKKGAKLTPEEEEILNKKRSKKIQKKYDERKKNAKISSLLEEQFQQGK

SEQ ID NO: 21003 - protein, 70 aa, Synthetic construct
VRTKTLVKNCIVLIDSTPYRQWYESHYALPPEEEEILNKKRSKKIQKKYDERKKNAKISSLLEEQFQQGK

SEQ ID NO: 21004 - protein, 70 aa, Synthetic construct
VRTKTLVKNCIVLIDSTPYRQWYESHYALPLGRKKILNKKRSKKIQKKYDERKKNAKISSLLEEQFQQGK

SEQ ID NO: 21005 - protein, 70 aa, Synthetic construct
VRTKTLVKNCIVLIDSTPYRQWYESHYALPLGRKKGAKLTRSKKIQKKYDERKKNAKISSLLEEQFQQGK

SEQ ID NO: 21006 - protein, 70 aa, Synthetic construct
VRTKTLVKNCIVLIDSTPYRQWYESHYALPLGRKKGAKLTPEEEEQKKYDERKKNAKISSLLEEQFQQGK

SEQ ID NO: 21007 - protein, 70 aa, Synthetic construct
VRTKTLVKNCIVLIDSTPYRQWYESHYALPLGRKKGAKLTPEEEEILNKKRSKKIQKKYDLLEEQFQQGK

SEQ ID NO: 21008 - protein, 70 aa, Synthetic construct
VRTKTLVKNCIVLIDSTPYRQWYESHYALPLGRKKGAKLTPEEEEILNKKRSKKIQKKYDERKKNFQQGK

SEQ ID NO: 21009 - protein, 70 aa, Synthetic construct
SDTTRKPLEIRSPSAESKKPKWVPPAASGGSRSSSSPLVVVSVKSPNQSLRLGLSRLARVKPLHPNATST

SEQ ID NO: 21010 - protein, 70 aa, Synthetic construct
QSLPKKPLEIRSPSAESKKPKWVPPAASGGSRSSSSPLVVVSVKSPNQSLRLGLSRLARVKPLHPNATST

SEQ ID NO: 21011 - protein, 70 aa, Synthetic construct
QSLPKKVSLSRSPSAESKKPKWVPPAASGGSRSSSSPLVVVSVKSPNQSLRLGLSRLARVKPLHPNATST

SEQ ID NO: 21012 - protein, 70 aa, Synthetic construct
QSLPKKVSLSSDTTRESKKPKWVPPAASGGSRSSSSPLVVVSVKSPNQSLRLGLSRLARVKPLHPNATST

SEQ ID NO: 21013 - protein, 70 aa, Synthetic construct
QSLPKKVSLSSDTTRKPLEIKWVPPAASGGSRSSSSPLVVVSVKSPNQSLRLGLSRLARVKPLHPNATST

SEQ ID NO: 21014 - protein, 70 aa, Synthetic construct
QSLPKKVSLSSDTTRKPLEIRSPSAESKKPSRSSSSPLVVVSVKSPNQSLRLGLSRLARVKPLHPNATST

SEQ ID NO: 21015 - protein, 70 aa, Synthetic construct
QSLPKKVSLSSDTTRKPLEIRSPSAESKKPKWVPPSPLVVVSVKSPNQSLRLGLSRLARVKPLHPNATST

SEQ ID NO: 21016 - protein, 70 aa, Synthetic construct
QSLPKKVSLSSDTTRKPLEIRSPSAESKKPKWVPPAASGGVSVKSPNQSLRLGLSRLARVKPLHPNATST

SEQ ID NO: 21017 - protein, 70 aa, Synthetic construct
QSLPKKVSLSSDTTRKPLEIRSPSAESKKPKWVPPAASGGSRSSSPNQSLRLGLSRLARVKPLHPNATST

SEQ ID NO: 21018 - protein, 70 aa, Synthetic construct
QSLPKKVSLSSDTTRKPLEIRSPSAESKKPKWVPPAASGGSRSSSSPLVVRLGLSRLARVKPLHPNATST

SEQ ID NO: 21019 - protein, 70 aa, Synthetic construct
RLAMTWPHPADPAFYGGLPYPFPSHLPLPYYSPVGLGAASAASAAASPFSGSLRPLDTFRVLSQPYPRPE

SEQ ID NO: 21020 - protein, 70 aa, Synthetic construct
RLAMTWPHPADPAFYTYMMSPFPSHLPLPYYSPVGLGAASAASAAASPFSGSLRPLDTFRVLSQPYPRPE

SEQ ID NO: 21021 - protein, 70 aa, Synthetic construct
RLAMTWPHPADPAFYTYMMSHAAAAGGLPYPFPSHLPLPYAASAAASPFSGSLRPLDTFRVLSQPYPRPE

SEQ ID NO: 21022 - protein, 70 aa, Synthetic construct
RLAMTWPHPADPAFYTYMMSHAAAAGGLPYPFPSHLPLPYYSPVGASPFSGSLRPLDTFRVLSQPYPRPE

SEQ ID NO: 21023 - protein, 70 aa, Synthetic construct
RLAMTWPHPADPAFYTYMMSHAAAAGGLPYPFPSHLPLPYYSPVGLGAASGSLRPLDTFRVLSQPYPRPE

SEQ ID NO: 21024 - protein, 70 aa, Synthetic construct
RLAMTWPHPADPAFYTYMMSHAAAAGGLPYPFPSHLPLPYYSPVGLGAASAASAALDTFRVLSQPYPRPE

SEQ ID NO: 21025 - protein, 70 aa, Synthetic construct
RLAMTWPHPADPAFYTYMMSHAAAAGGLPYPFPSHLPLPYYSPVGLGAASAASAAASPFSVLSQPYPRPE

SEQ ID NO: 21026 - protein, 70 aa, Synthetic construct
RLAMTWPHPADPAFYTYMMSHAAAAGGLPYPFPSHLPLPYYSPVGLGAASAASAAASPFSGSLRPYPRPE

SEQ ID NO: 21027 - protein, 70 aa, Synthetic construct
RLAMTWPHPADPAFYTYMMSHAAAAGGLPYPFPSHLPLPYYSPVGLGAASAASAAASPFSGSLRPLDTFR

SEQ ID NO: 21028 - protein, 70 aa, Synthetic construct
AAVDGVIISLCCNSKTKSVVLQLADGQIFKYLWESSGGFPVRFPYPCTQTELAMIGEEECVLGLTDRCRF

SEQ ID NO: 21029 - protein, 70 aa, Synthetic construct
AAVDGVIISLCCNSKTKSVVLQLADGQIFKYLWESPSLAIKPWKNPCTQTELAMIGEEECVLGLTDRCRF

SEQ ID NO: 21030 - protein, 70 aa, Synthetic construct
AAVDGVIISLCCNSKTKSVVLQLADGQIFKYLWESPSLAIKPWKNSGGFPELAMIGEEECVLGLTDRCRF

SEQ ID NO: 21031 - protein, 70 aa, Synthetic construct
AAVDGVIISLCCNSKTKSVVLQLADGQIFKYLWESPSLAIKPWKNSGGFPVRFPYGEEECVLGLTDRCRF

SEQ ID NO: 21032 - protein, 70 aa, Synthetic construct
AAVDGVIISLCCNSKTKSVVLQLADGQIFKYLWESPSLAIKPWKNSGGFPVRFPYPCTQTVLGLTDRCRF

SEQ ID NO: 21033 - protein, 70 aa, Synthetic construct
AAVDGVIISLCCNSKTKSVVLQLADGQIFKYLWESPSLAIKPWKNSGGFPVRFPYPCTQTELAMIDRCRF

SEQ ID NO: 21034 - protein, 70 aa, Synthetic construct
AAVDGVIISLCCNSKTKSVVLQLADGQIFKYLWESPSLAIKPWKNSGGFPVRFPYPCTQTELAMIGEEEC

SEQ ID NO: 21035 - protein, 70 aa, Synthetic construct
SYHRQMSEPIVPAAPPPPQGFKQEYHDPLYEHGVPGMPGPPAHGFQSPMGIKQEPRDYCVDSEVPNCQSS

SEQ ID NO: 21036 - protein, 70 aa, Synthetic construct
QPGVPMSEPIVPAAPPPPQGFKQEYHDPLYEHGVPGMPGPPAHGFQSPMGIKQEPRDYCVDSEVPNCQSS

SEQ ID NO: 21037 - protein, 70 aa, Synthetic construct
QPGVPGDNRPVPAAPPPPQGFKQEYHDPLYEHGVPGMPGPPAHGFQSPMGIKQEPRDYCVDSEVPNCQSS

SEQ ID NO: 21038 - protein, 70 aa, Synthetic construct
QPGVPGDNRPSYHRQPPPQGFKQEYHDPLYEHGVPGMPGPPAHGFQSPMGIKQEPRDYCVDSEVPNCQSS

SEQ ID NO: 21039 - protein, 70 aa, Synthetic construct
QPGVPGDNRPSYHRQMSEPIFKQEYHDPLYEHGVPGMPGPPAHGFQSPMGIKQEPRDYCVDSEVPNCQSS

SEQ ID NO: 21040 - protein, 70 aa, Synthetic construct
QPGVPGDNRPSYHRQMSEPIVPAAPHDPLYEHGVPGMPGPPAHGFQSPMGIKQEPRDYCVDSEVPNCQSS

SEQ ID NO: 21041 - protein, 70 aa, Synthetic construct
QPGVPGDNRPSYHRQMSEPIVPAAPPPPQGEHGVPGMPGPPAHGFQSPMGIKQEPRDYCVDSEVPNCQSS

SEQ ID NO: 21042 - protein, 70 aa, Synthetic construct
QPGVPGDNRPSYHRQMSEPIVPAAPPPPQGFKQEYGMPGPPAHGFQSPMGIKQEPRDYCVDSEVPNCQSS

SEQ ID NO: 21043 - protein, 70 aa, Synthetic construct
QPGVPGDNRPSYHRQMSEPIVPAAPPPPQGFKQEYHDPLYPAHGFQSPMGIKQEPRDYCVDSEVPNCQSS

SEQ ID NO: 21044 - protein, 70 aa, Synthetic construct
QPGVPGDNRPSYHRQMSEPIVPAAPPPPQGFKQEYHDPLYEHGVPQSPMGIKQEPRDYCVDSEVPNCQSS

SEQ ID NO: 21045 - protein, 70 aa, Synthetic construct
QPGVPGDNRPSYHRQMSEPIVPAAPPPPQGFKQEYHDPLYEHGVPGMPGPIKQEPRDYCVDSEVPNCQSS

SEQ ID NO: 21046 - protein, 70 aa, Synthetic construct
QPGVPGDNRPSYHRQMSEPIVPAAPPPPQGFKQEYHDPLYEHGVPGMPGPPAHGFRDYCVDSEVPNCQSS

SEQ ID NO: 21047 - protein, 70 aa, Synthetic construct
QPGVPGDNRPSYHRQMSEPIVPAAPPPPQGFKQEYHDPLYEHGVPGMPGPPAHGFQSPMGDSEVPNCQSS

SEQ ID NO: 21048 - protein, 70 aa, Synthetic construct
QPGVPGDNRPSYHRQMSEPIVPAAPPPPQGFKQEYHDPLYEHGVPGMPGPPAHGFQSPMGIKQEPNCQSS

SEQ ID NO: 21049 - protein, 70 aa, Synthetic construct
QPGVPGDNRPSYHRQMSEPIVPAAPPPPQGFKQEYHDPLYEHGVPGMPGPPAHGFQSPMGIKQEPRDYCV

SEQ ID NO: 21050 - protein, 70 aa, Synthetic construct
LTDDSINPPALVHVHMQGQEALFSEDMPLRDVIVHLTKQVGTPSQTSQDTSLETGQGYEDEQDGWNSSSK

SEQ ID NO: 21051 - protein, 70 aa, Synthetic construct
LTDDSINPPALVHVHMQGQEALFSEDMPLRDVIVHLTKQVNAQTTTSQDTSLETGQGYEDEQDGWNSSSK

SEQ ID NO: 21052 - protein, 70 aa, Synthetic construct
LTDDSINPPALVHVHMQGQEALFSEDMPLRDVIVHLTKQVNAQTTREANMSLETGQGYEDEQDGWNSSSK

SEQ ID NO: 21053 - protein, 70 aa, Synthetic construct
LTDDSINPPALVHVHMQGQEALFSEDMPLRDVIVHLTKQVNAQTTREANMGTPSQQGYEDEQDGWNSSSK

SEQ ID NO: 21054 - protein, 70 aa, Synthetic construct
LTDDSINPPALVHVHMQGQEALFSEDMPLRDVIVHLTKQVNAQTTREANMGTPSQTSQDTEQDGWNSSSK

SEQ ID NO: 21055 - protein, 70 aa, Synthetic construct
LTDDSINPPALVHVHMQGQEALFSEDMPLRDVIVHLTKQVNAQTTREANMGTPSQTSQDTSLETGNSSSK

SEQ ID NO: 21056 - protein, 70 aa, Synthetic construct
LTDDSINPPALVHVHMQGQEALFSEDMPLRDVIVHLTKQVNAQTTREANMGTPSQTSQDTSLETGQGYED

SEQ ID NO: 21057 - protein, 70 aa, Synthetic construct
NEGNSTCEVHQKGSHGVQKSYKCEECPKVFKYLCHLLAHQRRHRNERPFVCPECQKGFFQISDLRVHQII

SEQ ID NO: 21058 - protein, 70 aa, Synthetic construct
SPESATCEVHQKGSHGVQKSYKCEECPKVFKYLCHLLAHQRRHRNERPFVCPECQKGFFQISDLRVHQII

SEQ ID NO: 21059 - protein, 70 aa, Synthetic construct
SPESALTHQSQKGSHGVQKSYKCEECPKVFKYLCHLLAHQRRHRNERPFVCPECQKGFFQISDLRVHQII

SEQ ID NO: 21060 - protein, 70 aa, Synthetic construct
SPESALTHQSNEGNSGVQKSYKCEECPKVFKYLCHLLAHQRRHRNERPFVCPECQKGFFQISDLRVHQII

SEQ ID NO: 21061 - protein, 70 aa, Synthetic construct
SPESALTHQSNEGNSTCEVHYKCEECPKVFKYLCHLLAHQRRHRNERPFVCPECQKGFFQISDLRVHQII

SEQ ID NO: 21062 - protein, 70 aa, Synthetic construct
SPESALTHQSNEGNSTCEVHQKGSHCPKVFKYLCHLLAHQRRHRNERPFVCPECQKGFFQISDLRVHQII

SEQ ID NO: 21063 - protein, 70 aa, Synthetic construct
SPESALTHQSNEGNSTCEVHQKGSHGVQKSKYLCHLLAHQRRHRNERPFVCPECQKGFFQISDLRVHQII

SEQ ID NO: 21064 - protein, 70 aa, Synthetic construct
SPESALTHQSNEGNSTCEVHQKGSHGVQKSYKCEELLAHQRRHRNERPFVCPECQKGFFQISDLRVHQII

SEQ ID NO: 21065 - protein, 70 aa, Synthetic construct
SPESALTHQSNEGNSTCEVHQKGSHGVQKSYKCEECPKVFRRHRNERPFVCPECQKGFFQISDLRVHQII

SEQ ID NO: 21066 - protein, 70 aa, Synthetic construct
SPESALTHQSNEGNSTCEVHQKGSHGVQKSYKCEECPKVFKYLCHERPFVCPECQKGFFQISDLRVHQII

SEQ ID NO: 21067 - protein, 70 aa, Synthetic construct
SPESALTHQSNEGNSTCEVHQKGSHGVQKSYKCEECPKVFKYLCHLLAHQRRHRNERPFVCPECQVHQII

SEQ ID NO: 21068 - protein, 70 aa, Synthetic construct
SPESALTHQSNEGNSTCEVHQKGSHGVQKSYKCEECPKVFKYLCHLLAHQRRHRNERPFVCPECQKGFFQ

SEQ ID NO: 21069 - protein, 70 aa, Synthetic construct
HQQGTSKDLSGAEKHQESEKPSFLPSGAPASLEILRKELTRAVSQAVDSVLQKVLLDPPGHLTQLGRSFQ

SEQ ID NO: 21070 - protein, 70 aa, Synthetic construct
GPRPWSKDLSGAEKHQESEKPSFLPSGAPASLEILRKELTRAVSQAVDSVLQKVLLDPPGHLTQLGRSFQ

SEQ ID NO: 21071 - protein, 70 aa, Synthetic construct
GPRPWVVDGDGAEKHQESEKPSFLPSGAPASLEILRKELTRAVSQAVDSVLQKVLLDPPGHLTQLGRSFQ

SEQ ID NO: 21072 - protein, 70 aa, Synthetic construct
GPRPWVVDGDHQQGTQESEKPSFLPSGAPASLEILRKELTRAVSQAVDSVLQKVLLDPPGHLTQLGRSFQ

SEQ ID NO: 21073 - protein, 70 aa, Synthetic construct
GPRPWVVDGDHQQGTSKDLSPSFLPSGAPASLEILRKELTRAVSQAVDSVLQKVLLDPPGHLTQLGRSFQ

SEQ ID NO: 21074 - protein, 70 aa, Synthetic construct
GPRPWVVDGDHQQGTSKDLSGAEKHSGAPASLEILRKELTRAVSQAVDSVLQKVLLDPPGHLTQLGRSFQ

SEQ ID NO: 21075 - protein, 70 aa, Synthetic construct
GPRPWVVDGDHQQGTSKDLSGAEKHQESEKSLEILRKELTRAVSQAVDSVLQKVLLDPPGHLTQLGRSFQ

SEQ ID NO: 21076 - protein, 70 aa, Synthetic construct
GPRPWVVDGDHQQGTSKDLSGAEKHQESEKPSFLPSGAPASLEILRKELTRAVSQAVDSVLQKVLGRSFQ

SEQ ID NO: 21077 - protein, 70 aa, Synthetic construct
GPRPWVVDGDHQQGTSKDLSGAEKHQESEKPSFLPSGAPASLEILRKELTRAVSQAVDSVLQKVLLDPPG

SEQ ID NO: 21078 - protein, 70 aa, Synthetic construct
PHYSFNHPFSINNLMFKAYEQALQYSPYGSTLPASLPLGSASVTTRSPIEPSALEPAYYQGVYSRPVLNT

SEQ ID NO: 21079 - protein, 70 aa, Synthetic construct
PHYSFNHPFSINNLMSSSEQQHKLDFKAYEQALQYLPLGSASVTTRSPIEPSALEPAYYQGVYSRPVLNT

SEQ ID NO: 21080 - protein, 70 aa, Synthetic construct
PHYSFNHPFSINNLMSSSEQQHKLDFKAYEQALQYSPYGSASVTTRSPIEPSALEPAYYQGVYSRPVLNT

SEQ ID NO: 21081 - protein, 70 aa, Synthetic construct
PHYSFNHPFSINNLMSSSEQQHKLDFKAYEQALQYSPYGSTLPASRSPIEPSALEPAYYQGVYSRPVLNT

SEQ ID NO: 21082 - protein, 70 aa, Synthetic construct
PHYSFNHPFSINNLMSSSEQQHKLDFKAYEQALQYSPYGSTLPASLPLGSPSALEPAYYQGVYSRPVLNT

SEQ ID NO: 21083 - protein, 70 aa, Synthetic construct
PHYSFNHPFSINNLMSSSEQQHKLDFKAYEQALQYSPYGSTLPASLPLGSASVTTPAYYQGVYSRPVLNT

SEQ ID NO: 21084 - protein, 70 aa, Synthetic construct
PHYSFNHPFSINNLMSSSEQQHKLDFKAYEQALQYSPYGSTLPASLPLGSASVTTRSPIEGVYSRPVLNT

SEQ ID NO: 21085 - protein, 70 aa, Synthetic construct
EYKALMRTRRQDARQSYVIPPQAGQVQMSSSDVLYPRAAGMPLAQPLVEHYVPRSLDPNMPVIVNTCSLR

SEQ ID NO: 21086 - protein, 70 aa, Synthetic construct
IVEGKMRTRRQDARQSYVIPPQAGQVQMSSSDVLYPRAAGMPLAQPLVEHYVPRSLDPNMPVIVNTCSLR

SEQ ID NO: 21087 - protein, 70 aa, Synthetic construct
IVEGKRLRVGQDARQSYVIPPQAGQVQMSSSDVLYPRAAGMPLAQPLVEHYVPRSLDPNMPVIVNTCSLR

SEQ ID NO: 21088 - protein, 70 aa, Synthetic construct
IVEGKRLRVGEYKALSYVIPPQAGQVQMSSSDVLYPRAAGMPLAQPLVEHYVPRSLDPNMPVIVNTCSLR

SEQ ID NO: 21089 - protein, 70 aa, Synthetic construct
IVEGKRLRVGEYKALMRTRRPQAGQVQMSSSDVLYPRAAGMPLAQPLVEHYVPRSLDPNMPVIVNTCSLR

SEQ ID NO: 21090 - protein, 70 aa, Synthetic construct
IVEGKRLRVGEYKALMRTRRQDARQVQMSSSDVLYPRAAGMPLAQPLVEHYVPRSLDPNMPVIVNTCSLR

SEQ ID NO: 21091 - protein, 70 aa, Synthetic construct
IVEGKRLRVGEYKALMRTRRQDARQSYVIPSDVLYPRAAGMPLAQPLVEHYVPRSLDPNMPVIVNTCSLR

SEQ ID NO: 21092 - protein, 70 aa, Synthetic construct
IVEGKRLRVGEYKALMRTRRQDARQSYVIPPQAGQPRAAGMPLAQPLVEHYVPRSLDPNMPVIVNTCSLR

SEQ ID NO: 21093 - protein, 70 aa, Synthetic construct
IVEGKRLRVGEYKALMRTRRQDARQSYVIPPQAGQVQMSSMPLAQPLVEHYVPRSLDPNMPVIVNTCSLR

SEQ ID NO: 21094 - protein, 70 aa, Synthetic construct
IVEGKRLRVGEYKALMRTRRQDARQSYVIPPQAGQVQMSSSDVLYPLVEHYVPRSLDPNMPVIVNTCSLR

SEQ ID NO: 21095 - protein, 70 aa, Synthetic construct
IVEGKRLRVGEYKALMRTRRQDARQSYVIPPQAGQVQMSSSDVLYPRAAGYVPRSLDPNMPVIVNTCSLR

SEQ ID NO: 21096 - protein, 70 aa, Synthetic construct
IVEGKRLRVGEYKALMRTRRQDARQSYVIPPQAGQVQMSSSDVLYPRAAGMPLAQLDPNMPVIVNTCSLR

SEQ ID NO: 21097 - protein, 70 aa, Synthetic construct
PLAQPLVEHYVPRSLDPNMPVIVNTCSLREEGEGTDDRHSVADGEMYRYSEDEDSEGEEKSDGELVVLTD

SEQ ID NO: 21098 - protein, 70 aa, Synthetic construct
DVLYPLVEHYVPRSLDPNMPVIVNTCSLREEGEGTDDRHSVADGEMYRYSEDEDSEGEEKSDGELVVLTD

SEQ ID NO: 21099 - protein, 70 aa, Synthetic construct
DVLYPRAAGMVPRSLDPNMPVIVNTCSLREEGEGTDDRHSVADGEMYRYSEDEDSEGEEKSDGELVVLTD

SEQ ID NO: 21100 - protein, 70 aa, Synthetic construct
DVLYPRAAGMPLAQPDPNMPVIVNTCSLREEGEGTDDRHSVADGEMYRYSEDEDSEGEEKSDGELVVLTD

SEQ ID NO: 21101 - protein, 70 aa, Synthetic construct
DVLYPRAAGMPLAQPLVEHYVPRSLDPNMPVIVNTCSLREVADGEMYRYSEDEDSEGEEKSDGELVVLTD

SEQ ID NO: 21102 - protein, 70 aa, Synthetic construct
DVLYPRAAGMPLAQPLVEHYVPRSLDPNMPVIVNTCSLREEGEGTMYRYSEDEDSEGEEKSDGELVVLTD

SEQ ID NO: 21103 - protein, 70 aa, Synthetic construct
DVLYPRAAGMPLAQPLVEHYVPRSLDPNMPVIVNTCSLREEGEGTDDRHSEDEDSEGEEKSDGELVVLTD

SEQ ID NO: 21104 - protein, 70 aa, Synthetic construct
DVLYPRAAGMPLAQPLVEHYVPRSLDPNMPVIVNTCSLREEGEGTDDRHSVADGEEGEEKSDGELVVLTD

SEQ ID NO: 21105 - protein, 70 aa, Synthetic construct
DVLYPRAAGMPLAQPLVEHYVPRSLDPNMPVIVNTCSLREEGEGTDDRHSVADGEMYRYSSDGELVVLTD

SEQ ID NO: 21106 - protein, 70 aa, Synthetic construct
DVLYPRAAGMPLAQPLVEHYVPRSLDPNMPVIVNTCSLREEGEGTDDRHSVADGEMYRYSEDEDSVVLTD

SEQ ID NO: 21107 - protein, 70 aa, Synthetic construct
DVLYPRAAGMPLAQPLVEHYVPRSLDPNMPVIVNTCSLREEGEGTDDRHSVADGEMYRYSEDEDSEGEEK

SEQ ID NO: 21108 - protein, 70 aa, Synthetic construct
GFQPRTPKPGSGSESGKERRTTSKEISVIQHTSSFEKSDSLEQPSGLEGEDKPLAQFPSPPPAPHGRSAH

SEQ ID NO: 21109 - protein, 70 aa, Synthetic construct
KSVPSTPKPGSGSESGKERRTTSKEISVIQHTSSFEKSDSLEQPSGLEGEDKPLAQFPSPPPAPHGRSAH

SEQ ID NO: 21110 - protein, 70 aa, Synthetic construct
KSVPSLEGPTSGSESGKERRTTSKEISVIQHTSSFEKSDSLEQPSGLEGEDKPLAQFPSPPPAPHGRSAH

SEQ ID NO: 21111 - protein, 70 aa, Synthetic construct
KSVPSLEGPTGFQPRGKERRTTSKEISVIQHTSSFEKSDSLEQPSGLEGEDKPLAQFPSPPPAPHGRSAH

SEQ ID NO: 21112 - protein, 70 aa, Synthetic construct
KSVPSLEGPTGFQPRTPKPGTTSKEISVIQHTSSFEKSDSLEQPSGLEGEDKPLAQFPSPPPAPHGRSAH

SEQ ID NO: 21113 - protein, 70 aa, Synthetic construct
KSVPSLEGPTGFQPRTPKPGSGSESISVIQHTSSFEKSDSLEQPSGLEGEDKPLAQFPSPPPAPHGRSAH

SEQ ID NO: 21114 - protein, 70 aa, Synthetic construct
KSVPSLEGPTGFQPRTPKPGSGSESGKERRTTSKEISVIQHTSSFGLEGEDKPLAQFPSPPPAPHGRSAH

SEQ ID NO: 21115 - protein, 70 aa, Synthetic construct
KSVPSLEGPTGFQPRTPKPGSGSESGKERRTTSKEISVIQHTSSFEKSDSDKPLAQFPSPPPAPHGRSAH

SEQ ID NO: 21116 - protein, 70 aa, Synthetic construct
KSVPSLEGPTGFQPRTPKPGSGSESGKERRTTSKEISVIQHTSSFEKSDSLEQPSQFPSPPPAPHGRSAH

SEQ ID NO: 21117 - protein, 70 aa, Synthetic construct
KSVPSLEGPTGFQPRTPKPGSGSESGKERRTTSKEISVIQHTSSFEKSDSLEQPSGLEGEPPAPHGRSAH

SEQ ID NO: 21118 - protein, 70 aa, Synthetic construct
KSVPSLEGPTGFQPRTPKPGSGSESGKERRTTSKEISVIQHTSSFEKSDSLEQPSGLEGEDKPLAGRSAH

SEQ ID NO: 21119 - protein, 70 aa, Synthetic construct
KSVPSLEGPTGFQPRTPKPGSGSESGKERRTTSKEISVIQHTSSFEKSDSLEQPSGLEGEDKPLAQFPSP

SEQ ID NO: 21120 - protein, 70 aa, Synthetic construct
NIQVPEILVTEPPPKEPEKTEEFQWPQRSQTLAQLPAEKLPPKKKRLRLAEMAQSSGESSFESSVPLSRS

SEQ ID NO: 21121 - protein, 70 aa, Synthetic construct
NIQVPEILVTEEPDRPDTEPEPPPKEPEKTEEFQWPQRSQTLAQLPAEKLEMAQSSGESSFESSVPLSRS

SEQ ID NO: 21122 - protein, 70 aa, Synthetic construct
NIQVPEILVTEEPDRPDTEPEPPPKEPEKTEEFQWPQRSQTLAQLPAEKLPPKKKRLRLAFESSVPLSRS

SEQ ID NO: 21123 - protein, 70 aa, Synthetic construct
NIQVPEILVTEEPDRPDTEPEPPPKEPEKTEEFQWPQRSQTLAQLPAEKLPPKKKRLRLAEMAQSPLSRS

SEQ ID NO: 21124 - protein, 70 aa, Synthetic construct
NIQVPEILVTEEPDRPDTEPEPPPKEPEKTEEFQWPQRSQTLAQLPAEKLPPKKKRLRLAEMAQSSGESS

SEQ ID NO: 21125 - protein, 70 aa, Synthetic construct
LSSPYSMPPLPPSLFQAPPLPLQPTVLHPGQLHLPQLMPHPANIPFRQPPSFLPMPYPTSSALSSGFFLP

SEQ ID NO: 21126 - protein, 70 aa, Synthetic construct
FFSTQSMPPLPPSLFQAPPLPLQPTVLHPGQLHLPQLMPHPANIPFRQPPSFLPMPYPTSSALSSGFFLP

SEQ ID NO: 21127 - protein, 70 aa, Synthetic construct
FFSTQAMSSLPPSLFQAPPLPLQPTVLHPGQLHLPQLMPHPANIPFRQPPSFLPMPYPTSSALSSGFFLP

SEQ ID NO: 21128 - protein, 70 aa, Synthetic construct
FFSTQAMSSLLSSPYQAPPLPLQPTVLHPGQLHLPQLMPHPANIPFRQPPSFLPMPYPTSSALSSGFFLP

SEQ ID NO: 21129 - protein, 70 aa, Synthetic construct
FFSTQAMSSLLSSPYSMPPLPLQPTVLHPGQLHLPQLMPHPANIPFRQPPSFLPMPYPTSSALSSGFFLP

SEQ ID NO: 21130 - protein, 70 aa, Synthetic construct
FFSTQAMSSLLSSPYSMPPLPPSLFVLHPGQLHLPQLMPHPANIPFRQPPSFLPMPYPTSSALSSGFFLP

SEQ ID NO: 21131 - protein, 70 aa, Synthetic construct
FFSTQAMSSLLSSPYSMPPLPPSLFQAPPLQLHLPQLMPHPANIPFRQPPSFLPMPYPTSSALSSGFFLP

SEQ ID NO: 21132 - protein, 70 aa, Synthetic construct
FFSTQAMSSLLSSPYSMPPLPPSLFQAPPLPLQPTQLMPHPANIPFRQPPSFLPMPYPTSSALSSGFFLP

SEQ ID NO: 21133 - protein, 70 aa, Synthetic construct
FFSTQAMSSLLSSPYSMPPLPPSLFQAPPLPLQPTVLHPGPANIPFRQPPSFLPMPYPTSSALSSGFFLP

SEQ ID NO: 21134 - protein, 70 aa, Synthetic construct
FFSTQAMSSLLSSPYSMPPLPPSLFQAPPLPLQPTVLHPGQLHLPFRQPPSFLPMPYPTSSALSSGFFLP

SEQ ID NO: 21135 - protein, 70 aa, Synthetic construct
FFSTQAMSSLLSSPYSMPPLPPSLFQAPPLPLQPTVLHPGQLHLPQLMPHSFLPMPYPTSSALSSGFFLP

SEQ ID NO: 21136 - protein, 70 aa, Synthetic construct
FFSTQAMSSLLSSPYSMPPLPPSLFQAPPLPLQPTVLHPGQLHLPQLMPHPANIPPYPTSSALSSGFFLP

SEQ ID NO: 21137 - protein, 70 aa, Synthetic construct
FFSTQAMSSLLSSPYSMPPLPPSLFQAPPLPLQPTVLHPGQLHLPQLMPHPANIPFRQPPSALSSGFFLP

SEQ ID NO: 21138 - protein, 70 aa, Synthetic construct
FFSTQAMSSLLSSPYSMPPLPPSLFQAPPLPLQPTVLHPGQLHLPQLMPHPANIPFRQPPSFLPMGFFLP

SEQ ID NO: 21139 - protein, 70 aa, Synthetic construct
FFSTQAMSSLLSSPYSMPPLPPSLFQAPPLPLQPTVLHPGQLHLPQLMPHPANIPFRQPPSFLPMPYPTS

SEQ ID NO: 21140 - protein, 70 aa, Synthetic construct
VLQFPSLHTTTNVSWCYLNYIKPNHIQHADRRSSVYAGWCVSTKAALSLLRSKQKVSKETYTMATAPHPE

SEQ ID NO: 21141 - protein, 70 aa, Synthetic construct
VLQFPSLHTTTNVSWCYLNYIKPNHIQHADRRSSVYAGWCISLYNPNLPGRSKQKVSKETYTMATAPHPE

SEQ ID NO: 21142 - protein, 70 aa, Synthetic construct
SQGATRKYKVWMRHRYHSCCNRLGELLGHPSFQVKELALSALLKFVQLEGAHPLEKSKWEGNYLFPRELF

SEQ ID NO: 21143 - protein, 70 aa, Synthetic construct
LPSEERKYKVWMRHRYHSCCNRLGELLGHPSFQVKELALSALLKFVQLEGAHPLEKSKWEGNYLFPRELF

SEQ ID NO: 21144 - protein, 70 aa, Synthetic construct
LPSEEMVMTGWMRHRYHSCCNRLGELLGHPSFQVKELALSALLKFVQLEGAHPLEKSKWEGNYLFPRELF

SEQ ID NO: 21145 - protein, 70 aa, Synthetic construct
LPSEEMVMTGSQGATYHSCCNRLGELLGHPSFQVKELALSALLKFVQLEGAHPLEKSKWEGNYLFPRELF

SEQ ID NO: 21146 - protein, 70 aa, Synthetic construct
LPSEEMVMTGSQGATRKYKVWMRHRYHSCCSFQVKELALSALLKFVQLEGAHPLEKSKWEGNYLFPRELF

SEQ ID NO: 21147 - protein, 70 aa, Synthetic construct
LPSEEMVMTGSQGATRKYKVWMRHRYHSCCNRLGELLGHPSFQVKELALSALLKFVQLEGGNYLFPRELF

SEQ ID NO: 21148 - protein, 70 aa, Synthetic construct
LPSEEMVMTGSQGATRKYKVWMRHRYHSCCNRLGELLGHPSFQVKELALSALLKFVQLEGAHPLEPRELF

SEQ ID NO: 21149 - protein, 70 aa, Synthetic construct
LPSEEMVMTGSQGATRKYKVWMRHRYHSCCNRLGELLGHPSFQVKELALSALLKFVQLEGAHPLEKSKWE

SEQ ID NO: 21150 - protein, 70 aa, Synthetic construct
AKRGNGLRAVTPLRPGELLFRSDPLAYTVCKGSRGVVCDRCLLGKEKLMRCSQCRVAKYCSAKCQKKAWP

SEQ ID NO: 21151 - protein, 70 aa, Synthetic construct
EPLKVGLRAVTPLRPGELLFRSDPLAYTVCKGSRGVVCDRCLLGKEKLMRCSQCRVAKYCSAKCQKKAWP

SEQ ID NO: 21152 - protein, 70 aa, Synthetic construct
EPLKVEKFATTPLRPGELLFRSDPLAYTVCKGSRGVVCDRCLLGKEKLMRCSQCRVAKYCSAKCQKKAWP

SEQ ID NO: 21153 - protein, 70 aa, Synthetic construct
EPLKVEKFATAKRGNGELLFRSDPLAYTVCKGSRGVVCDRCLLGKEKLMRCSQCRVAKYCSAKCQKKAWP

SEQ ID NO: 21154 - protein, 70 aa, Synthetic construct
EPLKVEKFATAKRGNGLRAVRSDPLAYTVCKGSRGVVCDRCLLGKEKLMRCSQCRVAKYCSAKCQKKAWP

SEQ ID NO: 21155 - protein, 70 aa, Synthetic construct
EPLKVEKFATAKRGNGLRAVTPLRPAYTVCKGSRGVVCDRCLLGKEKLMRCSQCRVAKYCSAKCQKKAWP

SEQ ID NO: 21156 - protein, 70 aa, Synthetic construct
EPLKVEKFATAKRGNGLRAVTPLRPGELLFKGSRGVVCDRCLLGKEKLMRCSQCRVAKYCSAKCQKKAWP

SEQ ID NO: 21157 - protein, 70 aa, Synthetic construct
EPLKVEKFATAKRGNGLRAVTPLRPGELLFRSDPLVVCDRCLLGKEKLMRCSQCRVAKYCSAKCQKKAWP

SEQ ID NO: 21158 - protein, 70 aa, Synthetic construct
EPLKVEKFATAKRGNGLRAVTPLRPGELLFRSDPLAYTVCKGSRGVVCDRCLLGKVAKYCSAKCQKKAWP

SEQ ID NO: 21159 - protein, 70 aa, Synthetic construct
EPLKVEKFATAKRGNGLRAVTPLRPGELLFRSDPLAYTVCKGSRGVVCDRCLLGKEKLMRSAKCQKKAWP

SEQ ID NO: 21160 - protein, 70 aa, Synthetic construct
EPLKVEKFATAKRGNGLRAVTPLRPGELLFRSDPLAYTVCKGSRGVVCDRCLLGKEKLMRCSQCRKKAWP

SEQ ID NO: 21161 - protein, 70 aa, Synthetic construct
EPLKVEKFATAKRGNGLRAVTPLRPGELLFRSDPLAYTVCKGSRGVVCDRCLLGKEKLMRCSQCRVAKYC

SEQ ID NO: 21162 - protein, 70 aa, Synthetic construct
VKEKCKEEFVEEIKKLATQHKQLISQTKKKQWCYNCEEEAMYHCCWNTSYCSIKCQQEHWHAEHKRTCRR

SEQ ID NO: 21163 - protein, 70 aa, Synthetic construct
QGEMDKEEFVEEIKKLATQHKQLISQTKKKQWCYNCEEEAMYHCCWNTSYCSIKCQQEHWHAEHKRTCRR

SEQ ID NO: 21164 - protein, 70 aa, Synthetic construct
QGEMDRKCKQEEIKKLATQHKQLISQTKKKQWCYNCEEEAMYHCCWNTSYCSIKCQQEHWHAEHKRTCRR

SEQ ID NO: 21165 - protein, 70 aa, Synthetic construct
QGEMDRKCKQVKEKCKEEFVKQLISQTKKKQWCYNCEEEAMYHCCWNTSYCSIKCQQEHWHAEHKRTCRR

SEQ ID NO: 21166 - protein, 70 aa, Synthetic construct
QGEMDRKCKQVKEKCKEEFVEEIKKLATQHQWCYNCEEEAMYHCCWNTSYCSIKCQQEHWHAEHKRTCRR

SEQ ID NO: 21167 - protein, 70 aa, Synthetic construct
QGEMDRKCKQVKEKCKEEFVEEIKKLATQHKQLISCEEEAMYHCCWNTSYCSIKCQQEHWHAEHKRTCRR

SEQ ID NO: 21168 - protein, 70 aa, Synthetic construct
QGEMDRKCKQVKEKCKEEFVEEIKKLATQHKQLISQTKKKMYHCCWNTSYCSIKCQQEHWHAEHKRTCRR

SEQ ID NO: 21169 - protein, 70 aa, Synthetic construct
QGEMDRKCKQVKEKCKEEFVEEIKKLATQHKQLISQTKKKQWCYNWNTSYCSIKCQQEHWHAEHKRTCRR

SEQ ID NO: 21170 - protein, 70 aa, Synthetic construct
QGEMDRKCKQVKEKCKEEFVEEIKKLATQHKQLISQTKKKQWCYNCEEEAMYHCCQQEHWHAEHKRTCRR

SEQ ID NO: 21171 - protein, 70 aa, Synthetic construct
CRVLEPAVSARLLEHLWRRAASATLDGGRAGDSSGPSAPAPAPASAPEPASAPVPSPPSPPCGPGLWRPW

SEQ ID NO: 21172 - protein, 70 aa, Synthetic construct
VARLAPAVSARLLEHLWRRAASATLDGGRAGDSSGPSAPAPAPASAPEPASAPVPSPPSPPCGPGLWRPW

SEQ ID NO: 21173 - protein, 70 aa, Synthetic construct
VARLARVLPARLLEHLWRRAASATLDGGRAGDSSGPSAPAPAPASAPEPASAPVPSPPSPPCGPGLWRPW

SEQ ID NO: 21174 - protein, 70 aa, Synthetic construct
VARLARVLPACRVLELWRRAASATLDGGRAGDSSGPSAPAPAPASAPEPASAPVPSPPSPPCGPGLWRPW

SEQ ID NO: 21175 - protein, 70 aa, Synthetic construct
VARLARVLPACRVLEPAVSAASATLDGGRAGDSSGPSAPAPAPASAPEPASAPVPSPPSPPCGPGLWRPW

SEQ ID NO: 21176 - protein, 70 aa, Synthetic construct
VARLARVLPACRVLEPAVSARLLEHDGGRAGDSSGPSAPAPAPASAPEPASAPVPSPPSPPCGPGLWRPW

SEQ ID NO: 21177 - protein, 70 aa, Synthetic construct
VARLARVLPACRVLEPAVSARLLEHLWRRAGDSSGPSAPAPAPASAPEPASAPVPSPPSPPCGPGLWRPW

SEQ ID NO: 21178 - protein, 70 aa, Synthetic construct
VARLARVLPACRVLEPAVSARLLEHLWRRAASATLPSAPAPAPASAPEPASAPVPSPPSPPCGPGLWRPW

SEQ ID NO: 21179 - protein, 70 aa, Synthetic construct
VARLARVLPACRVLEPAVSARLLEHLWRRAASATLDGGRAPAPASAPEPASAPVPSPPSPPCGPGLWRPW

SEQ ID NO: 21180 - protein, 70 aa, Synthetic construct
VARLARVLPACRVLEPAVSARLLEHLWRRAASATLDGGRAGDSSGAPEPASAPVPSPPSPPCGPGLWRPW

SEQ ID NO: 21181 - protein, 70 aa, Synthetic construct
VARLARVLPACRVLEPAVSARLLEHLWRRAASATLDGGRAGDSSGPSAPASAPVPSPPSPPCGPGLWRPW

SEQ ID NO: 21182 - protein, 70 aa, Synthetic construct
VARLARVLPACRVLEPAVSARLLEHLWRRAASATLDGGRAGDSSGPSAPAPAPASSPPSPPCGPGLWRPW

SEQ ID NO: 21183 - protein, 70 aa, Synthetic construct
VARLARVLPACRVLEPAVSARLLEHLWRRAASATLDGGRAGDSSGPSAPAPAPASAPEPAPCGPGLWRPW

SEQ ID NO: 21184 - protein, 70 aa, Synthetic construct
VARLARVLPACRVLEPAVSARLLEHLWRRAASATLDGGRAGDSSGPSAPAPAPASAPEPASAPVPLWRPW

SEQ ID NO: 21185 - protein, 70 aa, Synthetic construct
PPQIKVEPISEGESEEVEVTDISDEDEEDGEVFKTPRAPPAPPKPEPGEAPGASQCMPLKLRFKRRWSED

SEQ ID NO: 21186 - protein, 70 aa, Synthetic construct
GAGALAPPPPEGESEEVEVTDISDEDEEDGEVFKTPRAPPAPPKPEPGEAPGASQCMPLKLRFKRRWSED

SEQ ID NO: 21187 - protein, 70 aa, Synthetic construct
GAGALAPPPPPPQIKEVEVTDISDEDEEDGEVFKTPRAPPAPPKPEPGEAPGASQCMPLKLRFKRRWSED

SEQ ID NO: 21188 - protein, 70 aa, Synthetic construct
GAGALAPPPPPPQIKVEPISDISDEDEEDGEVFKTPRAPPAPPKPEPGEAPGASQCMPLKLRFKRRWSED

SEQ ID NO: 21189 - protein, 70 aa, Synthetic construct
GAGALAPPPPPPQIKVEPISEGESEDEEDGEVFKTPRAPPAPPKPEPGEAPGASQCMPLKLRFKRRWSED

SEQ ID NO: 21190 - protein, 70 aa, Synthetic construct
GAGALAPPPPPPQIKVEPISEGESEEVEVTEVFKTPRAPPAPPKPEPGEAPGASQCMPLKLRFKRRWSED

SEQ ID NO: 21191 - protein, 70 aa, Synthetic construct
GAGALAPPPPPPQIKVEPISEGESEEVEVTDISDEPRAPPAPPKPEPGEAPGASQCMPLKLRFKRRWSED

SEQ ID NO: 21192 - protein, 70 aa, Synthetic construct
GAGALAPPPPPPQIKVEPISEGESEEVEVTDISDEDEEDGAPPKPEPGEAPGASQCMPLKLRFKRRWSED

SEQ ID NO: 21193 - protein, 70 aa, Synthetic construct
GAGALAPPPPPPQIKVEPISEGESEEVEVTDISDEDEEDGEVFKTEPGEAPGASQCMPLKLRFKRRWSED

SEQ ID NO: 21194 - protein, 70 aa, Synthetic construct
GAGALAPPPPPPQIKVEPISEGESEEVEVTDISDEDEEDGEVFKTPRAPPPGASQCMPLKLRFKRRWSED

SEQ ID NO: 21195 - protein, 70 aa, Synthetic construct
GAGALAPPPPPPQIKVEPISEGESEEVEVTDISDEDEEDGEVFKTPRAPPAPPKPEPGEALRFKRRWSED

SEQ ID NO: 21196 - protein, 70 aa, Synthetic construct
GAGALAPPPPPPQIKVEPISEGESEEVEVTDISDEDEEDGEVFKTPRAPPAPPKPEPGEAPGASQRWSED

SEQ ID NO: 21197 - protein, 70 aa, Synthetic construct
GAGALAPPPPPPQIKVEPISEGESEEVEVTDISDEDEEDGEVFKTPRAPPAPPKPEPGEAPGASQCMPLK

SEQ ID NO: 21198 - protein, 70 aa, Synthetic construct
APPKPEPGEAPGASQCMPLKLRFKRRWSEDCRLEGGGGPAGGFEDEGEDKKVRGEGPGEAGGPLTPRRVS

SEQ ID NO: 21199 - protein, 70 aa, Synthetic construct
EVFKTEPGEAPGASQCMPLKLRFKRRWSEDCRLEGGGGPAGGFEDEGEDKKVRGEGPGEAGGPLTPRRVS

SEQ ID NO: 21200 - protein, 70 aa, Synthetic construct
EVFKTPRAPPPGASQCMPLKLRFKRRWSEDCRLEGGGGPAGGFEDEGEDKKVRGEGPGEAGGPLTPRRVS

SEQ ID NO: 21201 - protein, 70 aa, Synthetic construct
EVFKTPRAPPAPPKPCMPLKLRFKRRWSEDCRLEGGGGPAGGFEDEGEDKKVRGEGPGEAGGPLTPRRVS

SEQ ID NO: 21202 - protein, 70 aa, Synthetic construct
EVFKTPRAPPAPPKPEPGEAPGASQCMPLKLRFKRGGGPAGGFEDEGEDKKVRGEGPGEAGGPLTPRRVS

SEQ ID NO: 21203 - protein, 70 aa, Synthetic construct
EVFKTPRAPPAPPKPEPGEAPGASQCMPLKLRFKRRWSEDGGFEDEGEDKKVRGEGPGEAGGPLTPRRVS

SEQ ID NO: 21204 - protein, 70 aa, Synthetic construct
EVFKTPRAPPAPPKPEPGEAPGASQCMPLKLRFKRRWSEDCRLEGEGEDKKVRGEGPGEAGGPLTPRRVS

SEQ ID NO: 21205 - protein, 70 aa, Synthetic construct
EVFKTPRAPPAPPKPEPGEAPGASQCMPLKLRFKRRWSEDCRLEGGGGPAKVRGEGPGEAGGPLTPRRVS

SEQ ID NO: 21206 - protein, 70 aa, Synthetic construct
EVFKTPRAPPAPPKPEPGEAPGASQCMPLKLRFKRRWSEDCRLEGGGGPAGGFEDGPGEAGGPLTPRRVS

SEQ ID NO: 21207 - protein, 70 aa, Synthetic construct
EVFKTPRAPPAPPKPEPGEAPGASQCMPLKLRFKRRWSEDCRLEGGGGPAGGFEDEGEDKGGPLTPRRVS

SEQ ID NO: 21208 - protein, 70 aa, Synthetic construct
EVFKTPRAPPAPPKPEPGEAPGASQCMPLKLRFKRRWSEDCRLEGGGGPAGGFEDEGEDKKVRGEPRRVS

SEQ ID NO: 21209 - protein, 70 aa, Synthetic construct
EGHQPQKVARRVFTNSRERWRQQNVNGAFAELRKLLPTHPPDRKLSKNEVLRLAMKYIGFLVRLLRDQAA

SEQ ID NO: 21210 - protein, 70 aa, Synthetic construct
RPSHCQKVARRVFTNSRERWRQQNVNGAFAELRKLLPTHPPDRKLSKNEVLRLAMKYIGFLVRLLRDQAA

SEQ ID NO: 21211 - protein, 70 aa, Synthetic construct
RPSHCELDLARVFTNSRERWRQQNVNGAFAELRKLLPTHPPDRKLSKNEVLRLAMKYIGFLVRLLRDQAA

SEQ ID NO: 21212 - protein, 70 aa, Synthetic construct
RPSHCELDLAEGHQPSRERWRQQNVNGAFAELRKLLPTHPPDRKLSKNEVLRLAMKYIGFLVRLLRDQAA

SEQ ID NO: 21213 - protein, 70 aa, Synthetic construct
RPSHCELDLAEGHQPQKVARRVFTNSRERWRQQNVNGAFAPDRKLSKNEVLRLAMKYIGFLVRLLRDQAA

SEQ ID NO: 21214 - protein, 70 aa, Synthetic construct
LRLAMKYIGFLVRLLRDQAAALAAGVHRVPDDGARRGSGRRAEAAARSQPAPPADPDGSPGGAARPIKME

SEQ ID NO: 21215 - protein, 70 aa, Synthetic construct
LRLAMKYIGFLVRLLRDQAAALAAGPTPPGDDGARRGSGRRAEAAARSQPAPPADPDGSPGGAARPIKME

SEQ ID NO: 21216 - protein, 70 aa, Synthetic construct
LRLAMKYIGFLVRLLRDQAAALAAGPTPPGPRKRPRGSGRRAEAAARSQPAPPADPDGSPGGAARPIKME

SEQ ID NO: 21217 - protein, 70 aa, Synthetic construct
LRLAMKYIGFLVRLLRDQAAALAAGPTPPGPRKRPVHRVPRAEAAARSQPAPPADPDGSPGGAARPIKME

SEQ ID NO: 21218 - protein, 70 aa, Synthetic construct
LRLAMKYIGFLVRLLRDQAAALAAGPTPPGPRKRPVHRVPDDGARARSQPAPPADPDGSPGGAARPIKME

SEQ ID NO: 21219 - protein, 70 aa, Synthetic construct
LRLAMKYIGFLVRLLRDQAAALAAGPTPPGPRKRPVHRVPDDGARRGSGRAPPADPDGSPGGAARPIKME

SEQ ID NO: 21220 - protein, 70 aa, Synthetic construct
LRLAMKYIGFLVRLLRDQAAALAAGPTPPGPRKRPVHRVPDDGARRGSGRRAEAAPDGSPGGAARPIKME

SEQ ID NO: 21221 - protein, 70 aa, Synthetic construct
LRLAMKYIGFLVRLLRDQAAALAAGPTPPGPRKRPVHRVPDDGARRGSGRRAEAAARSQPGGAARPIKME

SEQ ID NO: 21222 - protein, 70 aa, Synthetic construct
LRLAMKYIGFLVRLLRDQAAALAAGPTPPGPRKRPVHRVPDDGARRGSGRRAEAAARSQPAPPADPIKME

SEQ ID NO: 21223 - protein, 70 aa, Synthetic construct
LRLAMKYIGFLVRLLRDQAAALAAGPTPPGPRKRPVHRVPDDGARRGSGRRAEAAARSQPAPPADPDGSP

SEQ ID NO: 21224 - protein, 70 aa, Synthetic construct
IKTVTQNGTHVASVPTAVHGQVNNAAASPLHMLATHASASASLPTKRHNGDQPEQPELKRIKTEDGEGIV

SEQ ID NO: 21225 - protein, 70 aa, Synthetic construct
QAPLGQNGTHVASVPTAVHGQVNNAAASPLHMLATHASASASLPTKRHNGDQPEQPELKRIKTEDGEGIV

SEQ ID NO: 21226 - protein, 70 aa, Synthetic construct
QAPLGQHQLPVASVPTAVHGQVNNAAASPLHMLATHASASASLPTKRHNGDQPEQPELKRIKTEDGEGIV

SEQ ID NO: 21227 - protein, 70 aa, Synthetic construct
QAPLGQHQLPIKTVTTAVHGQVNNAAASPLHMLATHASASASLPTKRHNGDQPEQPELKRIKTEDGEGIV

SEQ ID NO: 21228 - protein, 70 aa, Synthetic construct
QAPLGQHQLPIKTVTQNGTHQVNNAAASPLHMLATHASASASLPTKRHNGDQPEQPELKRIKTEDGEGIV

SEQ ID NO: 21229 - protein, 70 aa, Synthetic construct
QAPLGQHQLPIKTVTQNGTHVASVPAASPLHMLATHASASASLPTKRHNGDQPEQPELKRIKTEDGEGIV

SEQ ID NO: 21230 - protein, 70 aa, Synthetic construct
QAPLGQHQLPIKTVTQNGTHVASVPTAVHGHMLATHASASASLPTKRHNGDQPEQPELKRIKTEDGEGIV

SEQ ID NO: 21231 - protein, 70 aa, Synthetic construct
QAPLGQHQLPIKTVTQNGTHVASVPTAVHGQVNNAHASASASLPTKRHNGDQPEQPELKRIKTEDGEGIV

SEQ ID NO: 21232 - protein, 70 aa, Synthetic construct
QAPLGQHQLPIKTVTQNGTHVASVPTAVHGQVNNAAASPLASLPTKRHNGDQPEQPELKRIKTEDGEGIV

SEQ ID NO: 21233 - protein, 70 aa, Synthetic construct
QAPLGQHQLPIKTVTQNGTHVASVPTAVHGQVNNAAASPLHMLATKRHNGDQPEQPELKRIKTEDGEGIV

SEQ ID NO: 21234 - protein, 70 aa, Synthetic construct
QAPLGQHQLPIKTVTQNGTHVASVPTAVHGQVNNAAASPLHMLATHASASDQPEQPELKRIKTEDGEGIV

SEQ ID NO: 21235 - protein, 70 aa, Synthetic construct
QAPLGQHQLPIKTVTQNGTHVASVPTAVHGQVNNAAASPLHMLATHASASASLPTPELKRIKTEDGEGIV

SEQ ID NO: 21236 - protein, 70 aa, Synthetic construct
QAPLGQHQLPIKTVTQNGTHVASVPTAVHGQVNNAAASPLHMLATHASASASLPTKRHNGIKTEDGEGIV

SEQ ID NO: 21237 - protein, 70 aa, Synthetic construct
ERQRVKCVNEGYAQLRHHLPEEYLEKRLSKVETLRAAIKYINYLQSLLYPDKAETKNNPGKVSSMIATTS

SEQ ID NO: 21238 - protein, 70 aa, Synthetic construct
PAFTRKCVNEGYAQLRHHLPEEYLEKRLSKVETLRAAIKYINYLQSLLYPDKAETKNNPGKVSSMIATTS

SEQ ID NO: 21239 - protein, 70 aa, Synthetic construct
PAFTRKRNERGYAQLRHHLPEEYLEKRLSKVETLRAAIKYINYLQSLLYPDKAETKNNPGKVSSMIATTS

SEQ ID NO: 21240 - protein, 70 aa, Synthetic construct
PAFTRKRNERERQRVKCVNEGYAQLRHHLPVETLRAAIKYINYLQSLLYPDKAETKNNPGKVSSMIATTS

SEQ ID NO: 21241 - protein, 70 aa, Synthetic construct
PAFTRKRNERERQRVKCVNEGYAQLRHHLPEEYLEAAIKYINYLQSLLYPDKAETKNNPGKVSSMIATTS

SEQ ID NO: 21242 - protein, 70 aa, Synthetic construct
PAFTRKRNERERQRVKCVNEGYAQLRHHLPEEYLEKRLSKVETLRAAIKYINYLQSLLYPKVSSMIATTS

SEQ ID NO: 21243 - protein, 70 aa, Synthetic construct
PAFTRKRNERERQRVKCVNEGYAQLRHHLPEEYLEKRLSKVETLRAAIKYINYLQSLLYPDKAETIATTS

SEQ ID NO: 21244 - protein, 70 aa, Synthetic construct
PAFTRKRNERERQRVKCVNEGYAQLRHHLPEEYLEKRLSKVETLRAAIKYINYLQSLLYPDKAETKNNPG

SEQ ID NO: 21245 - protein, 70 aa, Synthetic construct
ETSDEAERPRPLLSHVKPTPPAPALRPPEPVPAPAALFSSPADEVLEAPEVVVAEAEEPKPQQLQQQREE

SEQ ID NO: 21246 - protein, 70 aa, Synthetic construct
ETSDEAERPRPLLSHILLEHNYALARPPEPVPAPAALFSSPADEVLEAPEVVVAEAEEPKPQQLQQQREE

SEQ ID NO: 21247 - protein, 70 aa, Synthetic construct
ETSDEAERPRPLLSHILLEHNYALAVKPTPVPAPAALFSSPADEVLEAPEVVVAEAEEPKPQQLQQQREE

SEQ ID NO: 21248 - protein, 70 aa, Synthetic construct
ETSDEAERPRPLLSHILLEHNYALAVKPTPPAPALALFSSPADEVLEAPEVVVAEAEEPKPQQLQQQREE

SEQ ID NO: 21249 - protein, 70 aa, Synthetic construct
ETSDEAERPRPLLSHILLEHNYALAVKPTPPAPALRPPEPVPAPAALFSSVVVAEAEEPKPQQLQQQREE

SEQ ID NO: 21250 - protein, 70 aa, Synthetic construct
ETSDEAERPRPLLSHILLEHNYALAVKPTPPAPALRPPEPVPAPAALFSSPADEVAEEPKPQQLQQQREE

SEQ ID NO: 21251 - protein, 70 aa, Synthetic construct
ETSDEAERPRPLLSHILLEHNYALAVKPTPPAPALRPPEPVPAPAALFSSPADEVLEAPEVVVAEQQREE

SEQ ID NO: 21252 - protein, 70 aa, Synthetic construct
PLTFRDVAIEFSLEEWQCLDTAQQDLYRKVMLENYRNLVFLGIAVSKPDLVTCLEQGKDPWNMKGHSTVV

SEQ ID NO: 21253 - protein, 70 aa, Synthetic construct
PGPPEDVAIEFSLEEWQCLDTAQQDLYRKVMLENYRNLVFLGIAVSKPDLVTCLEQGKDPWNMKGHSTVV

SEQ ID NO: 21254 - protein, 70 aa, Synthetic construct
PGPPESLDMGPLTFRDVAIEFSLEEWQCLDTAQQDRNLVFLGIAVSKPDLVTCLEQGKDPWNMKGHSTVV

SEQ ID NO: 21255 - protein, 70 aa, Synthetic construct
PGPPESLDMGPLTFRDVAIEFSLEEWQCLDTAQQDLYRKVMLENYRNLVFVTCLEQGKDPWNMKGHSTVV

SEQ ID NO: 21256 - protein, 70 aa, Synthetic construct
PGPPESLDMGPLTFRDVAIEFSLEEWQCLDTAQQDLYRKVMLENYRNLVFLGIAVQGKDPWNMKGHSTVV

SEQ ID NO: 21257 - protein, 70 aa, Synthetic construct
PGPPESLDMGPLTFRDVAIEFSLEEWQCLDTAQQDLYRKVMLENYRNLVFLGIAVSKPDLWNMKGHSTVV

SEQ ID NO: 21258 - protein, 70 aa, Synthetic construct
PGPPESLDMGPLTFRDVAIEFSLEEWQCLDTAQQDLYRKVMLENYRNLVFLGIAVSKPDLVTCLEHSTVV

SEQ ID NO: 21259 - protein, 70 aa, Synthetic construct
PGPPESLDMGPLTFRDVAIEFSLEEWQCLDTAQQDLYRKVMLENYRNLVFLGIAVSKPDLVTCLEQGKDP

SEQ ID NO: 21260 - protein, 70 aa, Synthetic construct
DLSEFRKLPREEEEEEEDDDEEEKAPVTLLDAQSLAQSFFNRLWEVAGQWQKQVPLAARASQRQWLVSIH

SEQ ID NO: 21261 - protein, 70 aa, Synthetic construct
HEAVSRKLPREEEEEEEDDDEEEKAPVTLLDAQSLAQSFFNRLWEVAGQWQKQVPLAARASQRQWLVSIH

SEQ ID NO: 21262 - protein, 70 aa, Synthetic construct
HEAVSQLLQTEEEEEEEDDDEEEKAPVTLLDAQSLAQSFFNRLWEVAGQWQKQVPLAARASQRQWLVSIH

SEQ ID NO: 21263 - protein, 70 aa, Synthetic construct
HEAVSQLLQTDLSEFEEDDDEEEKAPVTLLDAQSLAQSFFNRLWEVAGQWQKQVPLAARASQRQWLVSIH

SEQ ID NO: 21264 - protein, 70 aa, Synthetic construct
HEAVSQLLQTDLSEFRKLPREEEKAPVTLLDAQSLAQSFFNRLWEVAGQWQKQVPLAARASQRQWLVSIH

SEQ ID NO: 21265 - protein, 70 aa, Synthetic construct
HEAVSQLLQTDLSEFRKLPREEEEEPVTLLDAQSLAQSFFNRLWEVAGQWQKQVPLAARASQRQWLVSIH

SEQ ID NO: 21266 - protein, 70 aa, Synthetic construct
HEAVSQLLQTDLSEFRKLPREEEEEEEDDDEEEKAPVTLLDAQSLAQSFFNRLWEVAGQWSQRQWLVSIH

SEQ ID NO: 21267 - protein, 70 aa, Synthetic construct
HEAVSQLLQTDLSEFRKLPREEEEEEEDDDEEEKAPVTLLDAQSLAQSFFNRLWEVAGQWQKQVPLVSIH

SEQ ID NO: 21268 - protein, 70 aa, Synthetic construct
HEAVSQLLQTDLSEFRKLPREEEEEEEDDDEEEKAPVTLLDAQSLAQSFFNRLWEVAGQWQKQVPLAARA

SEQ ID NO: 21269 - protein, 70 aa, Synthetic construct
SEDYLLLACDGFFDVVPHQEVVGLVQSHLTRQQGSGLRVAEELVAAARERGSHDNITVMVVFLRDPQELL

SEQ ID NO: 21270 - protein, 70 aa, Synthetic construct
ADAASRALTGSEDYLLLACDVVGLVQSHLTRQQGSGLRVAEELVAAARERGSHDNITVMVVFLRDPQELL

SEQ ID NO: 21271 - protein, 70 aa, Synthetic construct
ADAASRALTGSEDYLLLACDGFFDVQSHLTRQQGSGLRVAEELVAAARERGSHDNITVMVVFLRDPQELL

SEQ ID NO: 21272 - protein, 70 aa, Synthetic construct
ADAASRALTGSEDYLLLACDGFFDVVPHQERQQGSGLRVAEELVAAARERGSHDNITVMVVFLRDPQELL

SEQ ID NO: 21273 - protein, 70 aa, Synthetic construct
ADAASRALTGSEDYLLLACDGFFDVVPHQEVVGLVGLRVAEELVAAARERGSHDNITVMVVFLRDPQELL

SEQ ID NO: 21274 - protein, 70 aa, Synthetic construct
ADAASRALTGSEDYLLLACDGFFDVVPHQEVVGLVQSHLTEELVAAARERGSHDNITVMVVFLRDPQELL

SEQ ID NO: 21275 - protein, 70 aa, Synthetic construct
ADAASRALTGSEDYLLLACDGFFDVVPHQEVVGLVQSHLTRQQGSAARERGSHDNITVMVVFLRDPQELL

SEQ ID NO: 21276 - protein, 70 aa, Synthetic construct
ADAASRALTGSEDYLLLACDGFFDVVPHQEVVGLVQSHLTRQQGSGLRVAGSHDNITVMVVFLRDPQELL

SEQ ID NO: 21277 - protein, 70 aa, Synthetic construct
GPQPPERKRRRRTAFTQFQLQELENFFDESQYPDVVARERLAARLNLTEDRVQVWFQNRRAKWKRNQRVL

SEQ ID NO: 21278 - protein, 70 aa, Synthetic construct
RDIDLICSNALEYNPDRDPGDRLIRHRACALRDTAYAIIKEELDEDFEQLCEEIQESRKKRGCSSSKYAP

SEQ ID NO: 21279 - protein, 70 aa, Synthetic construct
HKYLTICSNALEYNPDRDPGDRLIRHRACALRDTAYAIIKEELDEDFEQLCEEIQESRKKRGCSSSKYAP

SEQ ID NO: 21280 - protein, 70 aa, Synthetic construct
HKYLTVKDYLLEYNPDRDPGDRLIRHRACALRDTAYAIIKEELDEDFEQLCEEIQESRKKRGCSSSKYAP

SEQ ID NO: 21281 - protein, 70 aa, Synthetic construct
HKYLTVKDYLRDIDLDRDPGDRLIRHRACALRDTAYAIIKEELDEDFEQLCEEIQESRKKRGCSSSKYAP

SEQ ID NO: 21282 - protein, 70 aa, Synthetic construct
HKYLTVKDYLRDIDLICSNALEYNPHRACALRDTAYAIIKEELDEDFEQLCEEIQESRKKRGCSSSKYAP

SEQ ID NO: 21283 - protein, 70 aa, Synthetic construct
HKYLTVKDYLRDIDLICSNALEYNPDRDPGLRDTAYAIIKEELDEDFEQLCEEIQESRKKRGCSSSKYAP

SEQ ID NO: 21284 - protein, 70 aa, Synthetic construct
HKYLTVKDYLRDIDLICSNALEYNPDRDPGDRLIRYAIIKEELDEDFEQLCEEIQESRKKRGCSSSKYAP

SEQ ID NO: 21285 - protein, 70 aa, Synthetic construct
HKYLTVKDYLRDIDLICSNALEYNPDRDPGDRLIRHRACAEELDEDFEQLCEEIQESRKKRGCSSSKYAP

SEQ ID NO: 21286 - protein, 70 aa, Synthetic construct
HKYLTVKDYLRDIDLICSNALEYNPDRDPGDRLIRHRACALRDTADFEQLCEEIQESRKKRGCSSSKYAP

SEQ ID NO: 21287 - protein, 70 aa, Synthetic construct
HKYLTVKDYLRDIDLICSNALEYNPDRDPGDRLIRHRACALRDTAYAIIKCEEIQESRKKRGCSSSKYAP

SEQ ID NO: 21288 - protein, 70 aa, Synthetic construct
HKYLTVKDYLRDIDLICSNALEYNPDRDPGDRLIRHRACALRDTAYAIIKEELDEESRKKRGCSSSKYAP

SEQ ID NO: 21289 - protein, 70 aa, Synthetic construct
HKYLTVKDYLRDIDLICSNALEYNPDRDPGDRLIRHRACALRDTAYAIIKEELDEDFEQLRGCSSSKYAP

SEQ ID NO: 21290 - protein, 70 aa, Synthetic construct
HKYLTVKDYLRDIDLICSNALEYNPDRDPGDRLIRHRACALRDTAYAIIKEELDEDFEQLCEEIQSKYAP

SEQ ID NO: 21291 - protein, 70 aa, Synthetic construct
HKYLTVKDYLRDIDLICSNALEYNPDRDPGDRLIRHRACALRDTAYAIIKEELDEDFEQLCEEIQESRKK

SEQ ID NO: 21292 - protein, 70 aa, Synthetic construct
GPLTFMDVAIEFSLEEWQCLDTAQRNVYRHVMLENYRNLVDLWLEQNIKDSFQKVTLSRYGKYGHKNLQL

SEQ ID NO: 21293 - protein, 70 aa, Synthetic construct
GPLTFMDVAIEFSLEEWQCLDTAQRNVYRHVMLENYRNLVFLALCQNIKDSFQKVTLSRYGKYGHKNLQL

SEQ ID NO: 21294 - protein, 70 aa, Synthetic construct
GPLTFMDVAIEFSLEEWQCLDTAQRNVYRHVMLENYRNLVFLALCSRFAQSFQKVTLSRYGKYGHKNLQL

SEQ ID NO: 21295 - protein, 70 aa, Synthetic construct
GPLTFMDVAIEFSLEEWQCLDTAQRNVYRHVMLENYRNLVFLALCSRFAQDLWLETLSRYGKYGHKNLQL

SEQ ID NO: 21296 - protein, 70 aa, Synthetic construct
GPLTFMDVAIEFSLEEWQCLDTAQRNVYRHVMLENYRNLVFLALCSRFAQDLWLEQNIKDGKYGHKNLQL

SEQ ID NO: 21297 - protein, 70 aa, Synthetic construct
GPLTFMDVAIEFSLEEWQCLDTAQRNVYRHVMLENYRNLVFLALCSRFAQDLWLEQNIKDSFQKVKNLQL

SEQ ID NO: 21298 - protein, 70 aa, Synthetic construct
GPLTFMDVAIEFSLEEWQCLDTAQRNVYRHVMLENYRNLVFLALCSRFAQDLWLEQNIKDSFQKVTLSRY

SEQ ID NO: 21299 - protein, 70 aa, Synthetic construct
DSMELAKNKSKKRRNRTTFSTFQLEELEKVFQKTHYPDVYAREQLALRTDLTEARVQVWFQNRRAKWRKR

SEQ ID NO: 21300 - protein, 70 aa, Synthetic construct
LHLPLAKNKSKKRRNRTTFSTFQLEELEKVFQKTHYPDVYAREQLALRTDLTEARVQVWFQNRRAKWRKR

SEQ ID NO: 21301 - protein, 70 aa, Synthetic construct
LHLPLSPGLPKKRRNRTTFSTFQLEELEKVFQKTHYPDVYAREQLALRTDLTEARVQVWFQNRRAKWRKR

SEQ ID NO: 21302 - protein, 70 aa, Synthetic construct
SSWTVEDVMQFVREADPQLGPHADLFRKHEIDGKALLLLRSDMMMKYMGLKLGPALKLSYHIDRLKQGKF

SEQ ID NO: 21303 - protein, 70 aa, Synthetic construct
DASRLEDVMQFVREADPQLGPHADLFRKHEIDGKALLLLRSDMMMKYMGLKLGPALKLSYHIDRLKQGKF

SEQ ID NO: 21304 - protein, 70 aa, Synthetic construct
DASRLSGRDPSSWTVEDVMQFVREADPQLGPHADLFRKHEIDGKALLLLRKLGPALKLSYHIDRLKQGKF

SEQ ID NO: 21305 - protein, 70 aa, Synthetic construct
DASRLSGRDPSSWTVEDVMQFVREADPQLGPHADLFRKHEIDGKALLLLRSDMMMLKLSYHIDRLKQGKF

SEQ ID NO: 21306 - protein, 70 aa, Synthetic construct
GRLTFRDVAIEFSLAEWKCLNPSQRALYREVMLENYRNLEAVDISSKRMMKEVLSTGQGNTEVIHTGTLQ

SEQ ID NO: 21307 - protein, 70 aa, Synthetic construct
GKEPGMALPQGRLTFRDVAIEFSLAEWKCLNPSQRALYREVMLENYRNLEKEVLSTGQGNTEVIHTGTLQ

SEQ ID NO: 21308 - protein, 70 aa, Synthetic construct
GKEPGMALPQGRLTFRDVAIEFSLAEWKCLNPSQRALYREVMLENYRNLEAVDISTGQGNTEVIHTGTLQ

SEQ ID NO: 21309 - protein, 70 aa, Synthetic construct
GKEPGMALPQGRLTFRDVAIEFSLAEWKCLNPSQRALYREVMLENYRNLEAVDISSKRMMTEVIHTGTLQ

SEQ ID NO: 21310 - protein, 70 aa, Synthetic construct
GKEPGMALPQGRLTFRDVAIEFSLAEWKCLNPSQRALYREVMLENYRNLEAVDISSKRMMKEVLSTGTLQ

SEQ ID NO: 21311 - protein, 70 aa, Synthetic construct
GKEPGMALPQGRLTFRDVAIEFSLAEWKCLNPSQRALYREVMLENYRNLEAVDISSKRMMKEVLSTGQGN

SEQ ID NO: 21312 - protein, 70 aa, Synthetic construct
MKSERSDNEQPSSPRVNGLTTVALKETSTEALMKSSPEERERMIKQLKEELRLEEAKLVLLKKLRQSQIQ

SEQ ID NO: 21313 - protein, 70 aa, Synthetic construct
MKSERRPPSPPSSPRVNGLTTVALKETSTEALMKSSPEERERMIKQLKEELRLEEAKLVLLKKLRQSQIQ

SEQ ID NO: 21314 - protein, 70 aa, Synthetic construct
MKSERRPPSPDVIVLSDNEQTVALKETSTEALMKSSPEERERMIKQLKEELRLEEAKLVLLKKLRQSQIQ

SEQ ID NO: 21315 - protein, 70 aa, Synthetic construct
MKSERRPPSPDVIVLSDNEQPSSPRETSTEALMKSSPEERERMIKQLKEELRLEEAKLVLLKKLRQSQIQ

SEQ ID NO: 21316 - protein, 70 aa, Synthetic construct
MKSERRPPSPDVIVLSDNEQPSSPRVNGLTALMKSSPEERERMIKQLKEELRLEEAKLVLLKKLRQSQIQ

SEQ ID NO: 21317 - protein, 70 aa, Synthetic construct
MKSERRPPSPDVIVLSDNEQPSSPRVNGLTTVALKSPEERERMIKQLKEELRLEEAKLVLLKKLRQSQIQ

SEQ ID NO: 21318 - protein, 70 aa, Synthetic construct
MKSERRPPSPDVIVLSDNEQPSSPRVNGLTTVALKETSTEERMIKQLKEELRLEEAKLVLLKKLRQSQIQ

SEQ ID NO: 21319 - protein, 70 aa, Synthetic construct
SHMTSTNSVKLEMQSDEECDRKPLSREDEIRGHDEGSSLEEPLIESSEVADNRKVQELQGEGGIRLPNGK

SEQ ID NO: 21320 - protein, 70 aa, Synthetic construct
STPNGTNSVKLEMQSDEECDRKPLSREDEIRGHDEGSSLEEPLIESSEVADNRKVQELQGEGGIRLPNGK

SEQ ID NO: 21321 - protein, 70 aa, Synthetic construct
STPNGQHASPSHMTSTNSVKLEMQSDEECDRGHDEGSSLEEPLIESSEVADNRKVQELQGEGGIRLPNGK

SEQ ID NO: 21322 - protein, 70 aa, Synthetic construct
STPNGQHASPSHMTSTNSVKLEMQSDEECDRKPLSGSSLEEPLIESSEVADNRKVQELQGEGGIRLPNGK

SEQ ID NO: 21323 - protein, 70 aa, Synthetic construct
STPNGQHASPSHMTSTNSVKLEMQSDEECDRKPLSREDEIEPLIESSEVADNRKVQELQGEGGIRLPNGK

SEQ ID NO: 21324 - protein, 70 aa, Synthetic construct
STPNGQHASPSHMTSTNSVKLEMQSDEECDRKPLSREDEIRGHDESSEVADNRKVQELQGEGGIRLPNGK

SEQ ID NO: 21325 - protein, 70 aa, Synthetic construct
STPNGQHASPSHMTSTNSVKLEMQSDEECDRKPLSREDEIRGHDEGSSLEDNRKVQELQGEGGIRLPNGK

SEQ ID NO: 21326 - protein, 70 aa, Synthetic construct
STPNGQHASPSHMTSTNSVKLEMQSDEECDRKPLSREDEIRGHDEGSSLEEPLIEQELQGEGGIRLPNGK

SEQ ID NO: 21327 - protein, 70 aa, Synthetic construct
STPNGQHASPSHMTSTNSVKLEMQSDEECDRKPLSREDEIRGHDEGSSLEEPLIESSEVAEGGIRLPNGK

SEQ ID NO: 21328 - protein, 70 aa, Synthetic construct
STPNGQHASPSHMTSTNSVKLEMQSDEECDRKPLSREDEIRGHDEGSSLEEPLIESSEVADNRKVLPNGK

SEQ ID NO: 21329 - protein, 70 aa, Synthetic construct
STPNGQHASPSHMTSTNSVKLEMQSDEECDRKPLSREDEIRGHDEGSSLEEPLIESSEVADNRKVQELQG

SEQ ID NO: 21330 - protein, 70 aa, Synthetic construct
IYKVFNGEGEQIRAFKCEHCRVLFLDHVMYTIHMGCHGYRDPLECNICGYRSQDRYEFSSHIVRGEHTFH

SEQ ID NO: 21331 - protein, 70 aa, Synthetic construct
TKAPKNGEGEQIRAFKCEHCRVLFLDHVMYTIHMGCHGYRDPLECNICGYRSQDRYEFSSHIVRGEHTFH

SEQ ID NO: 21332 - protein, 70 aa, Synthetic construct
TKAPKGSLKDQIRAFKCEHCRVLFLDHVMYTIHMGCHGYRDPLECNICGYRSQDRYEFSSHIVRGEHTFH

SEQ ID NO: 21333 - protein, 70 aa, Synthetic construct
TKAPKGSLKDIYKVFKCEHCRVLFLDHVMYTIHMGCHGYRDPLECNICGYRSQDRYEFSSHIVRGEHTFH

SEQ ID NO: 21334 - protein, 70 aa, Synthetic construct
TKAPKGSLKDIYKVFNGEGEQIRAFKCEHCRVLFLDHVMYTIHMGCHGYRDPLECNICGYRSQDRYEFSS

SEQ ID NO: 21335 - protein, 70 aa, Synthetic construct
GEYRQRDSIASRTRSRSQTPNNTVTYESERGGFRRTFSRSERAGVRTYVSTIRIPIRRILNTGLSETTSV

SEQ ID NO: 21336 - protein, 70 aa, Synthetic construct
LDLQVRDSIASRTRSRSQTPNNTVTYESERGGFRRTFSRSERAGVRTYVSTIRIPIRRILNTGLSETTSV

SEQ ID NO: 21337 - protein, 70 aa, Synthetic construct
LDLQVRRVRPSRTRSRSQTPNNTVTYESERGGFRRTFSRSERAGVRTYVSTIRIPIRRILNTGLSETTSV

SEQ ID NO: 21338 - protein, 70 aa, Synthetic construct
LDLQVRRVRPGEYRQRSQTPNNTVTYESERGGFRRTFSRSERAGVRTYVSTIRIPIRRILNTGLSETTSV

SEQ ID NO: 21339 - protein, 70 aa, Synthetic construct
LDLQVRRVRPGEYRQRDSIANNTVTYESERGGFRRTFSRSERAGVRTYVSTIRIPIRRILNTGLSETTSV

SEQ ID NO: 21340 - protein, 70 aa, Synthetic construct
LDLQVRRVRPGEYRQRDSIASRTRSYESERGGFRRTFSRSERAGVRTYVSTIRIPIRRILNTGLSETTSV

SEQ ID NO: 21341 - protein, 70 aa, Synthetic construct
LDLQVRRVRPGEYRQRDSIASRTRSRSQTPGGFRRTFSRSERAGVRTYVSTIRIPIRRILNTGLSETTSV

SEQ ID NO: 21342 - protein, 70 aa, Synthetic construct
LDLQVRRVRPGEYRQRDSIASRTRSRSQTPNNTVTTFSRSERAGVRTYVSTIRIPIRRILNTGLSETTSV

SEQ ID NO: 21343 - protein, 70 aa, Synthetic construct
LDLQVRRVRPGEYRQRDSIASRTRSRSQTPNNTVTYESERERAGVRTYVSTIRIPIRRILNTGLSETTSV

SEQ ID NO: 21344 - protein, 70 aa, Synthetic construct
LDLQVRRVRPGEYRQRDSIASRTRSRSQTPNNTVTYESERGGFRRRTYVSTIRIPIRRILNTGLSETTSV

SEQ ID NO: 21345 - protein, 70 aa, Synthetic construct
LDLQVRRVRPGEYRQRDSIASRTRSRSQTPNNTVTYESERGGFRRTFSRSERAGVRTYVSTIRIPIRRIL

SEQ ID NO: 21346 - protein, 70 aa, Synthetic construct
PGPAASGASAKAPVRSVVTETVSTYVIRDEWGNQIWICPGCNKPDDGSPMIGCDDCDDWYHWPCVGIMTA

SEQ ID NO: 21347 - protein, 70 aa, Synthetic construct
AAAGPSGASAKAPVRSVVTETVSTYVIRDEWGNQIWICPGCNKPDDGSPMIGCDDCDDWYHWPCVGIMTA

SEQ ID NO: 21348 - protein, 70 aa, Synthetic construct
AAAGPALLPSKAPVRSVVTETVSTYVIRDEWGNQIWICPGCNKPDDGSPMIGCDDCDDWYHWPCVGIMTA

SEQ ID NO: 21349 - protein, 70 aa, Synthetic construct
AAAGPALLPSPGPAASVVTETVSTYVIRDEWGNQIWICPGCNKPDDGSPMIGCDDCDDWYHWPCVGIMTA

SEQ ID NO: 21350 - protein, 70 aa, Synthetic construct
AAAGPALLPSPGPAASGASATVSTYVIRDEWGNQIWICPGCNKPDDGSPMIGCDDCDDWYHWPCVGIMTA

SEQ ID NO: 21351 - protein, 70 aa, Synthetic construct
AAAGPALLPSPGPAASGASAKAPVRVIRDEWGNQIWICPGCNKPDDGSPMIGCDDCDDWYHWPCVGIMTA

SEQ ID NO: 21352 - protein, 70 aa, Synthetic construct
AAAGPALLPSPGPAASGASAKAPVRSVVTEWGNQIWICPGCNKPDDGSPMIGCDDCDDWYHWPCVGIMTA

SEQ ID NO: 21353 - protein, 70 aa, Synthetic construct
AAAGPALLPSPGPAASGASAKAPVRSVVTETVSTYWICPGCNKPDDGSPMIGCDDCDDWYHWPCVGIMTA

SEQ ID NO: 21354 - protein, 70 aa, Synthetic construct
AAAGPALLPSPGPAASGASAKAPVRSVVTETVSTYVIRDEWGNQIWICPGIGCDDCDDWYHWPCVGIMTA

SEQ ID NO: 21355 - protein, 70 aa, Synthetic construct
AAAGPALLPSPGPAASGASAKAPVRSVVTETVSTYVIRDEWGNQIWICPGCNKPDCDDWYHWPCVGIMTA

SEQ ID NO: 21356 - protein, 70 aa, Synthetic construct
AAAGPALLPSPGPAASGASAKAPVRSVVTETVSTYVIRDEWGNQIWICPGCNKPDDGSPMHWPCVGIMTA

SEQ ID NO: 21357 - protein, 70 aa, Synthetic construct
AAAGPALLPSPGPAASGASAKAPVRSVVTETVSTYVIRDEWGNQIWICPGCNKPDDGSPMIGCDDGIMTA

SEQ ID NO: 21358 - protein, 70 aa, Synthetic construct
AAAGPALLPSPGPAASGASAKAPVRSVVTETVSTYVIRDEWGNQIWICPGCNKPDDGSPMIGCDDCDDWY

SEQ ID NO: 21359 - protein, 70 aa, Synthetic construct
ETVSTYVIRDGCNKPDDGSPMIGCDDCDDWYHWPCVGIMTAPPEEMQWFCPKCANKKKDKKHKKRKHRAH

SEQ ID NO: 21360 - protein, 70 aa, Synthetic construct
ETVSTYVIRDEWGNQDDGSPMIGCDDCDDWYHWPCVGIMTAPPEEMQWFCPKCANKKKDKKHKKRKHRAH

SEQ ID NO: 21361 - protein, 70 aa, Synthetic construct
ETVSTYVIRDEWGNQIWICPMIGCDDCDDWYHWPCVGIMTAPPEEMQWFCPKCANKKKDKKHKKRKHRAH

SEQ ID NO: 21362 - protein, 70 aa, Synthetic construct
ETVSTYVIRDEWGNQIWICPGCNKPDCDDWYHWPCVGIMTAPPEEMQWFCPKCANKKKDKKHKKRKHRAH

SEQ ID NO: 21363 - protein, 70 aa, Synthetic construct
ETVSTYVIRDEWGNQIWICPGCNKPDDGSPYHWPCVGIMTAPPEEMQWFCPKCANKKKDKKHKKRKHRAH

SEQ ID NO: 21364 - protein, 70 aa, Synthetic construct
ETVSTYVIRDEWGNQIWICPGCNKPDDGSPMIGCDVGIMTAPPEEMQWFCPKCANKKKDKKHKKRKHRAH

SEQ ID NO: 21365 - protein, 70 aa, Synthetic construct
ETVSTYVIRDEWGNQIWICPGCNKPDDGSPMIGCDDCDDWAPPEEMQWFCPKCANKKKDKKHKKRKHRAH

SEQ ID NO: 21366 - protein, 70 aa, Synthetic construct
ETVSTYVIRDEWGNQIWICPGCNKPDDGSPMIGCDDCDDWYHWPCVGIMTPKCANKKKDKKHKKRKHRAH

SEQ ID NO: 21367 - protein, 70 aa, Synthetic construct
ETVSTYVIRDEWGNQIWICPGCNKPDDGSPMIGCDDCDDWYHWPCVGIMTAPPEEKKKDKKHKKRKHRAH

SEQ ID NO: 21368 - protein, 70 aa, Synthetic construct
ETVSTYVIRDEWGNQIWICPGCNKPDDGSPMIGCDDCDDWYHWPCVGIMTAPPEEMQWFCKHKKRKHRAH

SEQ ID NO: 21369 - protein, 70 aa, Synthetic construct
ETVSTYVIRDEWGNQIWICPGCNKPDDGSPMIGCDDCDDWYHWPCVGIMTAPPEEMQWFCPKCANKHRAH

SEQ ID NO: 21370 - protein, 70 aa, Synthetic construct
MSISSDEVNFLVYRYLQESGFSHSAFTFGIESHISQSNINSIIQKGLQYVEAEVSINEDGTLFDGRPIES

SEQ ID NO: 21371 - protein, 70 aa, Synthetic construct
MSISSDEVNFLVYRYLQESGFSHSAFTFGIESHISQSNINGALVPGLQYVEAEVSINEDGTLFDGRPIES

SEQ ID NO: 21372 - protein, 70 aa, Synthetic construct
MSISSDEVNFLVYRYLQESGFSHSAFTFGIESHISQSNINGALVPPAALIEAEVSINEDGTLFDGRPIES

SEQ ID NO: 21373 - protein, 70 aa, Synthetic construct
MSISSDEVNFLVYRYLQESGFSHSAFTFGIESHISQSNINGALVPPAALISIIQKGLQYVTLFDGRPIES

SEQ ID NO: 21374 - protein, 70 aa, Synthetic construct
MSISSDEVNFLVYRYLQESGFSHSAFTFGIESHISQSNINGALVPPAALISIIQKGLQYVEAEVSRPIES

SEQ ID NO: 21375 - protein, 70 aa, Synthetic construct
MSISSDEVNFLVYRYLQESGFSHSAFTFGIESHISQSNINGALVPPAALISIIQKGLQYVEAEVSINEDG

SEQ ID NO: 21376 - protein, 70 aa, Synthetic construct
TLASSSSEEMESQLQERVESSRRAVSQIVTVYDKLQEKVELLSRKLNSGDNLIVEEAVQELNSFLAQENM

SEQ ID NO: 21377 - protein, 70 aa, Synthetic construct
GQEPASSEEMESQLQERVESSRRAVSQIVTVYDKLQEKVELLSRKLNSGDNLIVEEAVQELNSFLAQENM

SEQ ID NO: 21378 - protein, 70 aa, Synthetic construct
GQEPAFSFLAESQLQERVESSRRAVSQIVTVYDKLQEKVELLSRKLNSGDNLIVEEAVQELNSFLAQENM

SEQ ID NO: 21379 - protein, 70 aa, Synthetic construct
GQEPAFSFLATLASSERVESSRRAVSQIVTVYDKLQEKVELLSRKLNSGDNLIVEEAVQELNSFLAQENM

SEQ ID NO: 21380 - protein, 70 aa, Synthetic construct
GQEPAFSFLATLASSSSEEMSRRAVSQIVTVYDKLQEKVELLSRKLNSGDNLIVEEAVQELNSFLAQENM

SEQ ID NO: 21381 - protein, 70 aa, Synthetic construct
GQEPAFSFLATLASSSSEEMESQLQSQIVTVYDKLQEKVELLSRKLNSGDNLIVEEAVQELNSFLAQENM

SEQ ID NO: 21382 - protein, 70 aa, Synthetic construct
GQEPAFSFLATLASSSSEEMESQLQERVESVYDKLQEKVELLSRKLNSGDNLIVEEAVQELNSFLAQENM

SEQ ID NO: 21383 - protein, 70 aa, Synthetic construct
PPQHLAAPAHQPQPAAQLHRTTNFFIDNILRPDFGCKKEQPPPQLLVAAAARGGAGGGGRVERDRGQTAA

SEQ ID NO: 21384 - protein, 70 aa, Synthetic construct
PHLPPAAPAHQPQPAAQLHRTTNFFIDNILRPDFGCKKEQPPPQLLVAAAARGGAGGGGRVERDRGQTAA

SEQ ID NO: 21385 - protein, 70 aa, Synthetic construct
PHLPPHPPPPQPQPAAQLHRTTNFFIDNILRPDFGCKKEQPPPQLLVAAAARGGAGGGGRVERDRGQTAA

SEQ ID NO: 21386 - protein, 70 aa, Synthetic construct
PHLPPHPPPPPPQHLAQLHRTTNFFIDNILRPDFGCKKEQPPPQLLVAAAARGGAGGGGRVERDRGQTAA

SEQ ID NO: 21387 - protein, 70 aa, Synthetic construct
PHLPPHPPPPPPQHLAAPAHTTNFFIDNILRPDFGCKKEQPPPQLLVAAAARGGAGGGGRVERDRGQTAA

SEQ ID NO: 21388 - protein, 70 aa, Synthetic construct
PHLPPHPPPPPPQHLAAPAHQPQPAAQLHRTTNFFIDNILRPDFGLVAAAARGGAGGGGRVERDRGQTAA

SEQ ID NO: 21389 - protein, 70 aa, Synthetic construct
PHLPPHPPPPPPQHLAAPAHQPQPAAQLHRTTNFFIDNILRPDFGCKKEQARGGAGGGGRVERDRGQTAA

SEQ ID NO: 21390 - protein, 70 aa, Synthetic construct
PHLPPHPPPPPPQHLAAPAHQPQPAAQLHRTTNFFIDNILRPDFGCKKEQPPPQLGGGGRVERDRGQTAA

SEQ ID NO: 21391 - protein, 70 aa, Synthetic construct
PHLPPHPPPPPPQHLAAPAHQPQPAAQLHRTTNFFIDNILRPDFGCKKEQPPPQLLVAAAVERDRGQTAA

SEQ ID NO: 21392 - protein, 70 aa, Synthetic construct
PHLPPHPPPPPPQHLAAPAHQPQPAAQLHRTTNFFIDNILRPDFGCKKEQPPPQLLVAAAARGGAGQTAA

SEQ ID NO: 21393 - protein, 70 aa, Synthetic construct
PHLPPHPPPPPPQHLAAPAHQPQPAAQLHRTTNFFIDNILRPDFGCKKEQPPPQLLVAAAARGGAGGGGR

SEQ ID NO: 21394 - protein, 70 aa, Synthetic construct
ISSGKKKRKRCGMCAPCRRRINCEQCSSCRNRKTGHQICKFRKCEELKKKPSAALEKVMLPTGAAFRWFQ

SEQ ID NO: 21395 - protein, 70 aa, Synthetic construct
YPMQGKKRKRCGMCAPCRRRINCEQCSSCRNRKTGHQICKFRKCEELKKKPSAALEKVMLPTGAAFRWFQ

SEQ ID NO: 21396 - protein, 70 aa, Synthetic construct
YPMQGELASAISSGKKKRKRCGMCAPCRRRINCEQCSSCRNRKTGHQICKFRKCEELKKKPTGAAFRWFQ

SEQ ID NO: 21397 - protein, 70 aa, Synthetic construct
YPMQGELASAISSGKKKRKRCGMCAPCRRRINCEQCSSCRNRKTGHQICKFRKCEELKKKPSAALFRWFQ

SEQ ID NO: 21398 - protein, 70 aa, Synthetic construct
YPMQGELASAISSGKKKRKRCGMCAPCRRRINCEQCSSCRNRKTGHQICKFRKCEELKKKPSAALEKVML

SEQ ID NO: 21399 - protein, 70 aa, Synthetic construct
GECGMVFQRRYALIMHKLKHCKKQFQYSASLRAHLIRHTRKDAPSSSSSNSTSNEASGTSSEKGRTKREF

SEQ ID NO: 21400 - protein, 70 aa, Synthetic construct
GECGMVFQRRYALIMHKLKHERARDYKCPLCKKQFQYSASLRAHLIRHTRSTSNEASGTSSEKGRTKREF

SEQ ID NO: 21401 - protein, 70 aa, Synthetic construct
GECGMVFQRRYALIMHKLKHERARDYKCPLCKKQFQYSASLRAHLIRHTRKDAPSASGTSSEKGRTKREF

SEQ ID NO: 21402 - protein, 70 aa, Synthetic construct
GECGMVFQRRYALIMHKLKHERARDYKCPLCKKQFQYSASLRAHLIRHTRKDAPSSSSSNSEKGRTKREF

SEQ ID NO: 21403 - protein, 70 aa, Synthetic construct
GECGMVFQRRYALIMHKLKHERARDYKCPLCKKQFQYSASLRAHLIRHTRKDAPSSSSSNSTSNETKREF

SEQ ID NO: 21404 - protein, 70 aa, Synthetic construct
GECGMVFQRRYALIMHKLKHERARDYKCPLCKKQFQYSASLRAHLIRHTRKDAPSSSSSNSTSNEASGTS

SEQ ID NO: 21405 - protein, 70 aa, Synthetic construct
SVCRALKPFEAASREMSTQMSTLSQVIPMVHILNRKVEMLFEETMGIDTMLRSLKEAMVSRLSATLHDPR

SEQ ID NO: 21406 - protein, 70 aa, Synthetic construct
ISCDQLKPFEAASREMSTQMSTLSQVIPMVHILNRKVEMLFEETMGIDTMLRSLKEAMVSRLSATLHDPR

SEQ ID NO: 21407 - protein, 70 aa, Synthetic construct
ISCDQWEVMQAASREMSTQMSTLSQVIPMVHILNRKVEMLFEETMGIDTMLRSLKEAMVSRLSATLHDPR

SEQ ID NO: 21408 - protein, 70 aa, Synthetic construct
ISCDQWEVMQSVCRAMSTQMSTLSQVIPMVHILNRKVEMLFEETMGIDTMLRSLKEAMVSRLSATLHDPR

SEQ ID NO: 21409 - protein, 70 aa, Synthetic construct
ISCDQWEVMQSVCRALKPFESTLSQVIPMVHILNRKVEMLFEETMGIDTMLRSLKEAMVSRLSATLHDPR

SEQ ID NO: 21410 - protein, 70 aa, Synthetic construct
ISCDQWEVMQSVCRALKPFEAASREVIPMVHILNRKVEMLFEETMGIDTMLRSLKEAMVSRLSATLHDPR

SEQ ID NO: 21411 - protein, 70 aa, Synthetic construct
ISCDQWEVMQSVCRALKPFEAASREMSTQMHILNRKVEMLFEETMGIDTMLRSLKEAMVSRLSATLHDPR

SEQ ID NO: 21412 - protein, 70 aa, Synthetic construct
ISCDQWEVMQSVCRALKPFEAASREMSTQMSTLSQKVEMLFEETMGIDTMLRSLKEAMVSRLSATLHDPR

SEQ ID NO: 21413 - protein, 70 aa, Synthetic construct
ISCDQWEVMQSVCRALKPFEAASREMSTQMSTLSQVIPMVHILNRKVEMLLRSLKEAMVSRLSATLHDPR

SEQ ID NO: 21414 - protein, 70 aa, Synthetic construct
ISCDQWEVMQSVCRALKPFEAASREMSTQMSTLSQVIPMVHILNRKVEMLFEETMGIDTMLRSLKEAMVS

SEQ ID NO: 21415 - protein, 70 aa, Synthetic construct
ELVTFRDVAIEFSPEEWKCLDPAQQNLYRDVMLENYRNLVLVTCLEQIKEPCNLKIHETAAKPPAICSPF

SEQ ID NO: 21416 - protein, 70 aa, Synthetic construct
ELVTFRDVAIEFSPEEWKCLDPAQQNLYRDVMLENYRNLVSLGFVEQIKEPCNLKIHETAAKPPAICSPF

SEQ ID NO: 21417 - protein, 70 aa, Synthetic construct
ELVTFRDVAIEFSPEEWKCLDPAQQNLYRDVMLENYRNLVSLGFVISNPDPCNLKIHETAAKPPAICSPF

SEQ ID NO: 21418 - protein, 70 aa, Synthetic construct
ELVTFRDVAIEFSPEEWKCLDPAQQNLYRDVMLENYRNLVSLGFVISNPDLVTCLIHETAAKPPAICSPF

SEQ ID NO: 21419 - protein, 70 aa, Synthetic construct
ELVTFRDVAIEFSPEEWKCLDPAQQNLYRDVMLENYRNLVSLGFVISNPDLVTCLEQIKEAKPPAICSPF

SEQ ID NO: 21420 - protein, 70 aa, Synthetic construct
ELVTFRDVAIEFSPEEWKCLDPAQQNLYRDVMLENYRNLVSLGFVISNPDLVTCLEQIKEPCNLKICSPF

SEQ ID NO: 21421 - protein, 70 aa, Synthetic construct
ELVTFRDVAIEFSPEEWKCLDPAQQNLYRDVMLENYRNLVSLGFVISNPDLVTCLEQIKEPCNLKIHETA

SEQ ID NO: 21422 - protein, 70 aa, Synthetic construct
KLKTVPEGDWFCPECSRQRPSLESDEDVEDSMGGEDDEVDGDEEEGQSEEEEYEVEQDEDDSQEEEEVSL

SEQ ID NO: 21423 - protein, 70 aa, Synthetic construct
KLKTVPEGDWFCPECRPKQRSLESDEDVEDSMGGEDDEVDGDEEEGQSEEEEYEVEQDEDDSQEEEEVSL

SEQ ID NO: 21424 - protein, 70 aa, Synthetic construct
KLKTVPEGDWFCPECRPKQRSRRLSEDVEDSMGGEDDEVDGDEEEGQSEEEEYEVEQDEDDSQEEEEVSL

SEQ ID NO: 21425 - protein, 70 aa, Synthetic construct
KLKTVPEGDWFCPECRPKQRSRRLSSRQRPSMGGEDDEVDGDEEEGQSEEEEYEVEQDEDDSQEEEEVSL

SEQ ID NO: 21426 - protein, 70 aa, Synthetic construct
KLKTVPEGDWFCPECRPKQRSRRLSSRQRPSLESDDDEVDGDEEEGQSEEEEYEVEQDEDDSQEEEEVSL

SEQ ID NO: 21427 - protein, 70 aa, Synthetic construct
KLKTVPEGDWFCPECRPKQRSRRLSSRQRPSLESDEDVEDGDEEEGQSEEEEYEVEQDEDDSQEEEEVSL

SEQ ID NO: 21428 - protein, 70 aa, Synthetic construct
KLKTVPEGDWFCPECRPKQRSRRLSSRQRPSLESDEDVEDSMGGEGQSEEEEYEVEQDEDDSQEEEEVSL

SEQ ID NO: 21429 - protein, 70 aa, Synthetic construct
KLKTVPEGDWFCPECRPKQRSRRLSSRQRPSLESDEDVEDSMGGEDDEVDEEYEVEQDEDDSQEEEEVSL

SEQ ID NO: 21430 - protein, 70 aa, Synthetic construct
KLKTVPEGDWFCPECRPKQRSRRLSSRQRPSLESDEDVEDSMGGEDDEVDGDEEEEQDEDDSQEEEEVSL

SEQ ID NO: 21431 - protein, 70 aa, Synthetic construct
KLKTVPEGDWFCPECRPKQRSRRLSSRQRPSLESDEDVEDSMGGEDDEVDGDEEEGQSEEDSQEEEEVSL

SEQ ID NO: 21432 - protein, 70 aa, Synthetic construct
KLKTVPEGDWFCPECRPKQRSRRLSSRQRPSLESDEDVEDSMGGEDDEVDGDEEEGQSEEEEYEVEEVSL

SEQ ID NO: 21433 - protein, 70 aa, Synthetic construct
KLKTVPEGDWFCPECRPKQRSRRLSSRQRPSLESDEDVEDSMGGEDDEVDGDEEEGQSEEEEYEVEQDED

SEQ ID NO: 21434 - protein, 70 aa, Synthetic construct
PPPPPPPPPAELKAEPGFEPADCKRKEEAGAPGGGAGMAAGFPYALRAYLGYQAVPSGSSGSLSTSSSSS

SEQ ID NO: 21435 - protein, 70 aa, Synthetic construct
LHPGCPPPPAELKAEPGFEPADCKRKEEAGAPGGGAGMAAGFPYALRAYLGYQAVPSGSSGSLSTSSSSS

SEQ ID NO: 21436 - protein, 70 aa, Synthetic construct
LHPGCFAPLHELKAEPGFEPADCKRKEEAGAPGGGAGMAAGFPYALRAYLGYQAVPSGSSGSLSTSSSSS

SEQ ID NO: 21437 - protein, 70 aa, Synthetic construct
LHPGCFAPLHPPPPPPGFEPADCKRKEEAGAPGGGAGMAAGFPYALRAYLGYQAVPSGSSGSLSTSSSSS

SEQ ID NO: 21438 - protein, 70 aa, Synthetic construct
LHPGCFAPLHPPPPPPPPPAADCKRKEEAGAPGGGAGMAAGFPYALRAYLGYQAVPSGSSGSLSTSSSSS

SEQ ID NO: 21439 - protein, 70 aa, Synthetic construct
LHPGCFAPLHPPPPPPPPPAELKAEKEEAGAPGGGAGMAAGFPYALRAYLGYQAVPSGSSGSLSTSSSSS

SEQ ID NO: 21440 - protein, 70 aa, Synthetic construct
LHPGCFAPLHPPPPPPPPPAELKAEPGFEPAPGGGAGMAAGFPYALRAYLGYQAVPSGSSGSLSTSSSSS

SEQ ID NO: 21441 - protein, 70 aa, Synthetic construct
LHPGCFAPLHPPPPPPPPPAELKAEPGFEPADCKRAGMAAGFPYALRAYLGYQAVPSGSSGSLSTSSSSS

SEQ ID NO: 21442 - protein, 70 aa, Synthetic construct
LHPGCFAPLHPPPPPPPPPAELKAEPGFEPADCKRKEEAGGFPYALRAYLGYQAVPSGSSGSLSTSSSSS

SEQ ID NO: 21443 - protein, 70 aa, Synthetic construct
LHPGCFAPLHPPPPPPPPPAELKAEPGFEPADCKRKEEAGAPGGGLRAYLGYQAVPSGSSGSLSTSSSSS

SEQ ID NO: 21444 - protein, 70 aa, Synthetic construct
LHPGCFAPLHPPPPPPPPPAELKAEPGFEPADCKRKEEAGAPGGGAGMAAGFPYAPSGSSGSLSTSSSSS

SEQ ID NO: 21445 - protein, 70 aa, Synthetic construct
LHPGCFAPLHPPPPPPPPPAELKAEPGFEPADCKRKEEAGAPGGGAGMAAGFPYALRAYLGSLSTSSSSS

SEQ ID NO: 21446 - protein, 70 aa, Synthetic construct
LHPGCFAPLHPPPPPPPPPAELKAEPGFEPADCKRKEEAGAPGGGAGMAAGFPYALRAYLGYQAVSSSSS

SEQ ID NO: 21447 - protein, 70 aa, Synthetic construct
LHPGCFAPLHPPPPPPPPPAELKAEPGFEPADCKRKEEAGAPGGGAGMAAGFPYALRAYLGYQAVPSGSS

SEQ ID NO: 21448 - protein, 70 aa, Synthetic construct
KAKKTVDKHSDEYKIRRERNNIAVRKSRDKAKMRNLETQHKVLELVEQLSRELSTLRNLFKQLPEPLLAS

SEQ ID NO: 21449 - protein, 70 aa, Synthetic construct
KAKKTVDKHSDEYKIRRERNNIAVRKSRDKAKMRNLETQHKVLELTAENERLQKKLRNLFKQLPEPLLAS

SEQ ID NO: 21450 - protein, 70 aa, Synthetic construct
KAKKTVDKHSDEYKIRRERNNIAVRKSRDKAKMRNLETQHKVLELTAENERLQKKVEQLSKQLPEPLLAS

SEQ ID NO: 21451 - protein, 70 aa, Synthetic construct
KAKKTVDKHSDEYKIRRERNNIAVRKSRDKAKMRNLETQHKVLELTAENERLQKKVEQLSRELSTPLLAS

SEQ ID NO: 21452 - protein, 70 aa, Synthetic construct
KAKKTVDKHSDEYKIRRERNNIAVRKSRDKAKMRNLETQHKVLELTAENERLQKKVEQLSRELSTLRNLF

SEQ ID NO: 21453 - protein, 70 aa, Synthetic construct
HSSPQNPLLDCSLCGKVFSSASSLSKHYLTICSKAFKRQDHLTGHMLTHQKTKPFVCIEQGCSKSYCDYR

SEQ ID NO: 21454 - protein, 70 aa, Synthetic construct
HSSPQNPLLDCSLCGKVFSSASSLSKHYLTHSQERFKRQDHLTGHMLTHQKTKPFVCIEQGCSKSYCDYR

SEQ ID NO: 21455 - protein, 70 aa, Synthetic construct
HSSPQNPLLDCSLCGKVFSSASSLSKHYLTHSQERKHVCKHLTGHMLTHQKTKPFVCIEQGCSKSYCDYR

SEQ ID NO: 21456 - protein, 70 aa, Synthetic construct
HSSPQNPLLDCSLCGKVFSSASSLSKHYLTHSQERKHVCKICSKAMLTHQKTKPFVCIEQGCSKSYCDYR

SEQ ID NO: 21457 - protein, 70 aa, Synthetic construct
HSSPQNPLLDCSLCGKVFSSASSLSKHYLTHSQERKHVCKICSKAFKRQDKTKPFVCIEQGCSKSYCDYR

SEQ ID NO: 21458 - protein, 70 aa, Synthetic construct
HSSPQNPLLDCSLCGKVFSSASSLSKHYLTHSQERKHVCKICSKAFKRQDHLTGHVCIEQGCSKSYCDYR

SEQ ID NO: 21459 - protein, 70 aa, Synthetic construct
HSSPQNPLLDCSLCGKVFSSASSLSKHYLTHSQERKHVCKICSKAFKRQDHLTGHMLTHQGCSKSYCDYR

SEQ ID NO: 21460 - protein, 70 aa, Synthetic construct
HSSPQNPLLDCSLCGKVFSSASSLSKHYLTHSQERKHVCKICSKAFKRQDHLTGHMLTHQKTKPFYCDYR

SEQ ID NO: 21461 - protein, 70 aa, Synthetic construct
HSSPQNPLLDCSLCGKVFSSASSLSKHYLTHSQERKHVCKICSKAFKRQDHLTGHMLTHQKTKPFVCIEQ

SEQ ID NO: 21462 - protein, 70 aa, Synthetic construct
KRVKREPEEVPRERPSHHPTPKLKTKSYRRESILSSSPNAGSKRTPELLGSAESQGIFPCRECERVFDKI

SEQ ID NO: 21463 - protein, 70 aa, Synthetic construct
KRVKREPEEVERTEESHHPTPKLKTKSYRRESILSSSPNAGSKRTPELLGSAESQGIFPCRECERVFDKI

SEQ ID NO: 21464 - protein, 70 aa, Synthetic construct
KRVKREPEEVERTEEKVPCSPKLKTKSYRRESILSSSPNAGSKRTPELLGSAESQGIFPCRECERVFDKI

SEQ ID NO: 21465 - protein, 70 aa, Synthetic construct
KRVKREPEEVERTEEKVPCSPRERPKSYRRESILSSSPNAGSKRTPELLGSAESQGIFPCRECERVFDKI

SEQ ID NO: 21466 - protein, 70 aa, Synthetic construct
KRVKREPEEVERTEEKVPCSPRERPSHHPTESILSSSPNAGSKRTPELLGSAESQGIFPCRECERVFDKI

SEQ ID NO: 21467 - protein, 70 aa, Synthetic construct
KRVKREPEEVERTEEKVPCSPRERPSHHPTPKLKTSSPNAGSKRTPELLGSAESQGIFPCRECERVFDKI

SEQ ID NO: 21468 - protein, 70 aa, Synthetic construct
KRVKREPEEVERTEEKVPCSPRERPSHHPTPKLKTKSYRRGSKRTPELLGSAESQGIFPCRECERVFDKI

SEQ ID NO: 21469 - protein, 70 aa, Synthetic construct
KRVKREPEEVERTEEKVPCSPRERPSHHPTPKLKTKSYRRESILSPELLGSAESQGIFPCRECERVFDKI

SEQ ID NO: 21470 - protein, 70 aa, Synthetic construct
KRVKREPEEVERTEEKVPCSPRERPSHHPTPKLKTKSYRRESILSSSPNASAESQGIFPCRECERVFDKI

SEQ ID NO: 21471 - protein, 70 aa, Synthetic construct
KRVKREPEEVERTEEKVPCSPRERPSHHPTPKLKTKSYRRESILSSSPNAGSKRTGIFPCRECERVFDKI

SEQ ID NO: 21472 - protein, 70 aa, Synthetic construct
KRVKREPEEVERTEEKVPCSPRERPSHHPTPKLKTKSYRRESILSSSPNAGSKRTPELLGRECERVFDKI

SEQ ID NO: 21473 - protein, 70 aa, Synthetic construct
KRVKREPEEVERTEEKVPCSPRERPSHHPTPKLKTKSYRRESILSSSPNAGSKRTPELLGSAESQVFDKI

SEQ ID NO: 21474 - protein, 70 aa, Synthetic construct
KRVKREPEEVERTEEKVPCSPRERPSHHPTPKLKTKSYRRESILSSSPNAGSKRTPELLGSAESQGIFPC

SEQ ID NO: 21475 - protein, 70 aa, Synthetic construct
FLFGEPTLRKRKSPAQVMFQCLWKSCGKVLSTASAMQRHIRLVHLGRQAEPEQSDGEEDFYYTELDVGVD

SEQ ID NO: 21476 - protein, 70 aa, Synthetic construct
SPPLPPTLRKRKSPAQVMFQCLWKSCGKVLSTASAMQRHIRLVHLGRQAEPEQSDGEEDFYYTELDVGVD

SEQ ID NO: 21477 - protein, 70 aa, Synthetic construct
SPPLPPEAAHRKSPAQVMFQCLWKSCGKVLSTASAMQRHIRLVHLGRQAEPEQSDGEEDFYYTELDVGVD

SEQ ID NO: 21478 - protein, 70 aa, Synthetic construct
SPPLPPEAAHFLFGEQVMFQCLWKSCGKVLSTASAMQRHIRLVHLGRQAEPEQSDGEEDFYYTELDVGVD

SEQ ID NO: 21479 - protein, 70 aa, Synthetic construct
KCVCNLLKVNDLCWHVRCLSCSVCRTSLGRHTSCYIKDKDIFCKLDYFRRYGTRCSRCGRHIHSTDWVRR

SEQ ID NO: 21480 - protein, 70 aa, Synthetic construct
KCVCNSCGLEDLCWHVRCLSCSVCRTSLGRHTSCYIKDKDIFCKLDYFRRYGTRCSRCGRHIHSTDWVRR

SEQ ID NO: 21481 - protein, 70 aa, Synthetic construct
KCVCNSCGLEIVDKYVRCLSCSVCRTSLGRHTSCYIKDKDIFCKLDYFRRYGTRCSRCGRHIHSTDWVRR

SEQ ID NO: 21482 - protein, 70 aa, Synthetic construct
KCVCNSCGLEIVDKYLLKVNDLCWHTSLGRHTSCYIKDKDIFCKLDYFRRYGTRCSRCGRHIHSTDWVRR

SEQ ID NO: 21483 - protein, 70 aa, Synthetic construct
KCVCNSCGLEIVDKYLLKVNDLCWHVRCLSHTSCYIKDKDIFCKLDYFRRYGTRCSRCGRHIHSTDWVRR

SEQ ID NO: 21484 - protein, 70 aa, Synthetic construct
KCVCNSCGLEIVDKYLLKVNDLCWHVRCLSCSVCRIKDKDIFCKLDYFRRYGTRCSRCGRHIHSTDWVRR

SEQ ID NO: 21485 - protein, 70 aa, Synthetic construct
KCVCNSCGLEIVDKYLLKVNDLCWHVRCLSCSVCRTSLGRIFCKLDYFRRYGTRCSRCGRHIHSTDWVRR

SEQ ID NO: 21486 - protein, 70 aa, Synthetic construct
KCVCNSCGLEIVDKYLLKVNDLCWHVRCLSCSVCRTSLGRHTSCYIKDKDYGTRCSRCGRHIHSTDWVRR

SEQ ID NO: 21487 - protein, 70 aa, Synthetic construct
KCVCNSCGLEIVDKYLLKVNDLCWHVRCLSCSVCRTSLGRHTSCYIKDKDIFCKLDYFRRHIHSTDWVRR

SEQ ID NO: 21488 - protein, 70 aa, Synthetic construct
FACFSCKRQLSTGEEFALVEEKVLCRVHYDCMLDNLKREVENGNGISVEGALLTEQDVNHPKPAKRARTS

SEQ ID NO: 21489 - protein, 70 aa, Synthetic construct
AKGNVYHLACSTGEEFALVEEKVLCRVHYDCMLDNLKREVENGNGISVEGALLTEQDVNHPKPAKRARTS

SEQ ID NO: 21490 - protein, 70 aa, Synthetic construct
AKGNVYHLACFACFSCKRQLEKVLCRVHYDCMLDNLKREVENGNGISVEGALLTEQDVNHPKPAKRARTS

SEQ ID NO: 21491 - protein, 70 aa, Synthetic construct
AKGNVYHLACFACFSCKRQLSTGEERVHYDCMLDNLKREVENGNGISVEGALLTEQDVNHPKPAKRARTS

SEQ ID NO: 21492 - protein, 70 aa, Synthetic construct
AKGNVYHLACFACFSCKRQLSTGEEFALVECMLDNLKREVENGNGISVEGALLTEQDVNHPKPAKRARTS

SEQ ID NO: 21493 - protein, 70 aa, Synthetic construct
AKGNVYHLACFACFSCKRQLSTGEEFALVEEKVLCRVHYDCMLDNLKREVENGNGQDVNHPKPAKRARTS

SEQ ID NO: 21494 - protein, 70 aa, Synthetic construct
AKGNVYHLACFACFSCKRQLSTGEEFALVEEKVLCRVHYDCMLDNLKREVENGNGISVEGPKPAKRARTS

SEQ ID NO: 21495 - protein, 70 aa, Synthetic construct
AKGNVYHLACFACFSCKRQLSTGEEFALVEEKVLCRVHYDCMLDNLKREVENGNGISVEGALLTERARTS

SEQ ID NO: 21496 - protein, 70 aa, Synthetic construct
AKGNVYHLACFACFSCKRQLSTGEEFALVEEKVLCRVHYDCMLDNLKREVENGNGISVEGALLTEQDVNH

SEQ ID NO: 21497 - protein, 70 aa, Synthetic construct
VWVKEQKVQEIFMQGPYSLNGYRVRVYRQDSATQWFTGIITHHDLFTRTMIVMNDQVLEPQNVDPSMVQM

SEQ ID NO: 21498 - protein, 70 aa, Synthetic construct
DNPQLQKVQEIFMQGPYSLNGYRVRVYRQDSATQWFTGIITHHDLFTRTMIVMNDQVLEPQNVDPSMVQM

SEQ ID NO: 21499 - protein, 70 aa, Synthetic construct
DNPQLHEEVKIFMQGPYSLNGYRVRVYRQDSATQWFTGIITHHDLFTRTMIVMNDQVLEPQNVDPSMVQM

SEQ ID NO: 21500 - protein, 70 aa, Synthetic construct
DNPQLHEEVKVWVKEPYSLNGYRVRVYRQDSATQWFTGIITHHDLFTRTMIVMNDQVLEPQNVDPSMVQM

SEQ ID NO: 21501 - protein, 70 aa, Synthetic construct
DNPQLHEEVKVWVKEQKVQEGYRVRVYRQDSATQWFTGIITHHDLFTRTMIVMNDQVLEPQNVDPSMVQM

SEQ ID NO: 21502 - protein, 70 aa, Synthetic construct
DNPQLHEEVKVWVKEQKVQEIFMQGPYSLNGYRVRFTGIITHHDLFTRTMIVMNDQVLEPQNVDPSMVQM

SEQ ID NO: 21503 - protein, 70 aa, Synthetic construct
DNPQLHEEVKVWVKEQKVQEIFMQGPYSLNGYRVRVYRQDSATQWFTGIITHHDLFTRTMIVMNDSMVQM

SEQ ID NO: 21504 - protein, 70 aa, Synthetic construct
DNPQLHEEVKVWVKEQKVQEIFMQGPYSLNGYRVRVYRQDSATQWFTGIITHHDLFTRTMIVMNDQVLEP

SEQ ID NO: 21505 - protein, 70 aa, Synthetic construct
AAQYKSSNASETEPNAIKNQTLSASLPLDSTVICSTINKANSVGNGQASQTSQPNYHTKLKKAWLTRHSE

SEQ ID NO: 21506 - protein, 70 aa, Synthetic construct
HLKKHSSNASETEPNAIKNQTLSASLPLDSTVICSTINKANSVGNGQASQTSQPNYHTKLKKAWLTRHSE

SEQ ID NO: 21507 - protein, 70 aa, Synthetic construct
HLKKHKAALAETEPNAIKNQTLSASLPLDSTVICSTINKANSVGNGQASQTSQPNYHTKLKKAWLTRHSE

SEQ ID NO: 21508 - protein, 70 aa, Synthetic construct
HLKKHKAALAAAQYKAIKNQTLSASLPLDSTVICSTINKANSVGNGQASQTSQPNYHTKLKKAWLTRHSE

SEQ ID NO: 21509 - protein, 70 aa, Synthetic construct
HLKKHKAALAAAQYKSSNASTLSASLPLDSTVICSTINKANSVGNGQASQTSQPNYHTKLKKAWLTRHSE

SEQ ID NO: 21510 - protein, 70 aa, Synthetic construct
HLKKHKAALAAAQYKSSNASETEPNLPLDSTVICSTINKANSVGNGQASQTSQPNYHTKLKKAWLTRHSE

SEQ ID NO: 21511 - protein, 70 aa, Synthetic construct
HLKKHKAALAAAQYKSSNASETEPNAIKNQTVICSTINKANSVGNGQASQTSQPNYHTKLKKAWLTRHSE

SEQ ID NO: 21512 - protein, 70 aa, Synthetic construct
HLKKHKAALAAAQYKSSNASETEPNAIKNQTLSASTINKANSVGNGQASQTSQPNYHTKLKKAWLTRHSE

SEQ ID NO: 21513 - protein, 70 aa, Synthetic construct
HLKKHKAALAAAQYKSSNASETEPNAIKNQTLSASLPLDSNSVGNGQASQTSQPNYHTKLKKAWLTRHSE

SEQ ID NO: 21514 - protein, 70 aa, Synthetic construct
HLKKHKAALAAAQYKSSNASETEPNAIKNQTLSASLPLDSTVICSGQASQTSQPNYHTKLKKAWLTRHSE

SEQ ID NO: 21515 - protein, 70 aa, Synthetic construct
HLKKHKAALAAAQYKSSNASETEPNAIKNQTLSASLPLDSTVICSTINKATSQPNYHTKLKKAWLTRHSE

SEQ ID NO: 21516 - protein, 70 aa, Synthetic construct
HLKKHKAALAAAQYKSSNASETEPNAIKNQTLSASLPLDSTVICSTINKANSVGNYHTKLKKAWLTRHSE

SEQ ID NO: 21517 - protein, 70 aa, Synthetic construct
KSEKNGGSSPESDVGTDNKLTPPESQSPLHWLADLAEQKAREEKKENKELTLENQIKEEREQDNSESPNG

SEQ ID NO: 21518 - protein, 70 aa, Synthetic construct
PESQQQNTPPKSEKNTDNKLTPPESQSPLHWLADLAEQKAREEKKENKELTLENQIKEEREQDNSESPNG

SEQ ID NO: 21519 - protein, 70 aa, Synthetic construct
PESQQQNTPPKSEKNGGSSPTPPESQSPLHWLADLAEQKAREEKKENKELTLENQIKEEREQDNSESPNG

SEQ ID NO: 21520 - protein, 70 aa, Synthetic construct
PESQQQNTPPKSEKNGGSSPESDVGQSPLHWLADLAEQKAREEKKENKELTLENQIKEEREQDNSESPNG

SEQ ID NO: 21521 - protein, 70 aa, Synthetic construct
PESQQQNTPPKSEKNGGSSPESDVGTDNKLWLADLAEQKAREEKKENKELTLENQIKEEREQDNSESPNG

SEQ ID NO: 21522 - protein, 70 aa, Synthetic construct
PESQQQNTPPKSEKNGGSSPESDVGTDNKLTPPESAEQKAREEKKENKELTLENQIKEEREQDNSESPNG

SEQ ID NO: 21523 - protein, 70 aa, Synthetic construct
PESQQQNTPPKSEKNGGSSPESDVGTDNKLTPPESQSPLHWLADLAEQKATLENQIKEEREQDNSESPNG

SEQ ID NO: 21524 - protein, 70 aa, Synthetic construct
PESQQQNTPPKSEKNGGSSPESDVGTDNKLTPPESQSPLHWLADLAEQKAREEKKIKEEREQDNSESPNG

SEQ ID NO: 21525 - protein, 70 aa, Synthetic construct
PESQQQNTPPKSEKNGGSSPESDVGTDNKLTPPESQSPLHWLADLAEQKAREEKKENKELEQDNSESPNG

SEQ ID NO: 21526 - protein, 70 aa, Synthetic construct
VYSMGPNILDDIIASVVENKIPPSKTSKINVKPELKEEPEESIISAVDENNKLYSDIPHSWICEKHILWL

SEQ ID NO: 21527 - protein, 70 aa, Synthetic construct
VYSMGAPSSKDIIASVVENKIPPSKTSKINVKPELKEEPEESIISAVDENNKLYSDIPHSWICEKHILWL

SEQ ID NO: 21528 - protein, 70 aa, Synthetic construct
VYSMGAPSSKSGRTMVVENKIPPSKTSKINVKPELKEEPEESIISAVDENNKLYSDIPHSWICEKHILWL

SEQ ID NO: 21529 - protein, 70 aa, Synthetic construct
VYSMGAPSSKSGRTMPNILDIPPSKTSKINVKPELKEEPEESIISAVDENNKLYSDIPHSWICEKHILWL

SEQ ID NO: 21530 - protein, 70 aa, Synthetic construct
VYSMGAPSSKSGRTMPNILDDIIASVVENKVKPELKEEPEESIISAVDENNKLYSDIPHSWICEKHILWL

SEQ ID NO: 21531 - protein, 70 aa, Synthetic construct
VYSMGAPSSKSGRTMPNILDDIIASVVENKIPPSKTSKINVKPELKEEPEESIISDIPHSWICEKHILWL

SEQ ID NO: 21532 - protein, 70 aa, Synthetic construct
VYSMGAPSSKSGRTMPNILDDIIASVVENKIPPSKTSKINVKPELKEEPEESIISAVDENWICEKHILWL

SEQ ID NO: 21533 - protein, 70 aa, Synthetic construct
VYSMGAPSSKSGRTMPNILDDIIASVVENKIPPSKTSKINVKPELKEEPEESIISAVDENNKLYSHILWL

SEQ ID NO: 21534 - protein, 70 aa, Synthetic construct
VYSMGAPSSKSGRTMPNILDDIIASVVENKIPPSKTSKINVKPELKEEPEESIISAVDENNKLYSDIPHS

SEQ ID NO: 21535 - protein, 70 aa, Synthetic construct
GKVKKEQQDGEADDDKFPVCIREAVSQVLSGYDWTLVPMPVRVNGASKSKPHVKRPMNAFMVWAQAARRK

SEQ ID NO: 21536 - protein, 70 aa, Synthetic construct
LRASPGPGELGKVKKEQQDGIREAVSQVLSGYDWTLVPMPVRVNGASKSKPHVKRPMNAFMVWAQAARRK

SEQ ID NO: 21537 - protein, 70 aa, Synthetic construct
LRASPGPGELGKVKKEQQDGEADDDSQVLSGYDWTLVPMPVRVNGASKSKPHVKRPMNAFMVWAQAARRK

SEQ ID NO: 21538 - protein, 70 aa, Synthetic construct
LRASPGPGELGKVKKEQQDGEADDDKFPVCGYDWTLVPMPVRVNGASKSKPHVKRPMNAFMVWAQAARRK

SEQ ID NO: 21539 - protein, 70 aa, Synthetic construct
LRASPGPGELGKVKKEQQDGEADDDKFPVCIREAVLVPMPVRVNGASKSKPHVKRPMNAFMVWAQAARRK

SEQ ID NO: 21540 - protein, 70 aa, Synthetic construct
LRASPGPGELGKVKKEQQDGEADDDKFPVCIREAVSQVLSVRVNGASKSKPHVKRPMNAFMVWAQAARRK

SEQ ID NO: 21541 - protein, 70 aa, Synthetic construct
LRASPGPGELGKVKKEQQDGEADDDKFPVCIREAVSQVLSGYDWTASKSKPHVKRPMNAFMVWAQAARRK

SEQ ID NO: 21542 - protein, 70 aa, Synthetic construct
LRASPGPGELGKVKKEQQDGEADDDKFPVCIREAVSQVLSGYDWTLVPMPPHVKRPMNAFMVWAQAARRK

SEQ ID NO: 21543 - protein, 70 aa, Synthetic construct
LRASPGPGELGKVKKEQQDGEADDDKFPVCIREAVSQVLSGYDWTLVPMPVRVNGPMNAFMVWAQAARRK

SEQ ID NO: 21544 - protein, 70 aa, Synthetic construct
LRASPGPGELGKVKKEQQDGEADDDKFPVCIREAVSQVLSGYDWTLVPMPVRVNGASKSKMVWAQAARRK

SEQ ID NO: 21545 - protein, 70 aa, Synthetic construct
LRASPGPGELGKVKKEQQDGEADDDKFPVCIREAVSQVLSGYDWTLVPMPVRVNGASKSKPHVKRAARRK

SEQ ID NO: 21546 - protein, 70 aa, Synthetic construct
LRASPGPGELGKVKKEQQDGEADDDKFPVCIREAVSQVLSGYDWTLVPMPVRVNGASKSKPHVKRPMNAF

SEQ ID NO: 21547 - protein, 70 aa, Synthetic construct
PPNSQGFAPHYDDIEAFVLQLEGRKLWRVYRPRVPTEELALTSSPNFSQDDLGEPVLQTVLEPGDLLYFP

SEQ ID NO: 21548 - protein, 70 aa, Synthetic construct
SMAGSGFAPHYDDIEAFVLQLEGRKLWRVYRPRVPTEELALTSSPNFSQDDLGEPVLQTVLEPGDLLYFP

SEQ ID NO: 21549 - protein, 70 aa, Synthetic construct
SMAGSNVYLTYDDIEAFVLQLEGRKLWRVYRPRVPTEELALTSSPNFSQDDLGEPVLQTVLEPGDLLYFP

SEQ ID NO: 21550 - protein, 70 aa, Synthetic construct
SMAGSNVYLTPPNSQAFVLQLEGRKLWRVYRPRVPTEELALTSSPNFSQDDLGEPVLQTVLEPGDLLYFP

SEQ ID NO: 21551 - protein, 70 aa, Synthetic construct
SMAGSNVYLTPPNSQGFAPHYDDIEAFVLQLEGRKLWRVYLTSSPNFSQDDLGEPVLQTVLEPGDLLYFP

SEQ ID NO: 21552 - protein, 70 aa, Synthetic construct
SMAGSNVYLTPPNSQGFAPHYDDIEAFVLQLEGRKLWRVYRPRVPNFSQDDLGEPVLQTVLEPGDLLYFP

SEQ ID NO: 21553 - protein, 70 aa, Synthetic construct
SMAGSNVYLTPPNSQGFAPHYDDIEAFVLQLEGRKLWRVYRPRVPTEELADLGEPVLQTVLEPGDLLYFP

SEQ ID NO: 21554 - protein, 70 aa, Synthetic construct
SMAGSNVYLTPPNSQGFAPHYDDIEAFVLQLEGRKLWRVYRPRVPTEELALTSSPVLQTVLEPGDLLYFP

SEQ ID NO: 21555 - protein, 70 aa, Synthetic construct
SMAGSNVYLTPPNSQGFAPHYDDIEAFVLQLEGRKLWRVYRPRVPTEELALTSSPNFSQDLEPGDLLYFP

SEQ ID NO: 21556 - protein, 70 aa, Synthetic construct
KVEKEKSEKETTSKKNSHKKTRPRLKNVDRSSAQHLEVTVGDLTVIITDFKEKTKSPPASSAASADQHSQ

SEQ ID NO: 21557 - protein, 70 aa, Synthetic construct
PTQSKKSEKETTSKKNSHKKTRPRLKNVDRSSAQHLEVTVGDLTVIITDFKEKTKSPPASSAASADQHSQ

SEQ ID NO: 21558 - protein, 70 aa, Synthetic construct
PTQSKKEKKDTTSKKNSHKKTRPRLKNVDRSSAQHLEVTVGDLTVIITDFKEKTKSPPASSAASADQHSQ

SEQ ID NO: 21559 - protein, 70 aa, Synthetic construct
PTQSKKEKKDKVEKENSHKKTRPRLKNVDRSSAQHLEVTVGDLTVIITDFKEKTKSPPASSAASADQHSQ

SEQ ID NO: 21560 - protein, 70 aa, Synthetic construct
PTQSKKEKKDKVEKEKSEKETRPRLKNVDRSSAQHLEVTVGDLTVIITDFKEKTKSPPASSAASADQHSQ

SEQ ID NO: 21561 - protein, 70 aa, Synthetic construct
PTQSKKEKKDKVEKEKSEKETTSKKKNVDRSSAQHLEVTVGDLTVIITDFKEKTKSPPASSAASADQHSQ

SEQ ID NO: 21562 - protein, 70 aa, Synthetic construct
PTQSKKEKKDKVEKEKSEKETTSKKNSHKKSSAQHLEVTVGDLTVIITDFKEKTKSPPASSAASADQHSQ

SEQ ID NO: 21563 - protein, 70 aa, Synthetic construct
PTQSKKEKKDKVEKEKSEKETTSKKNSHKKTRPRLLEVTVGDLTVIITDFKEKTKSPPASSAASADQHSQ

SEQ ID NO: 21564 - protein, 70 aa, Synthetic construct
PTQSKKEKKDKVEKEKSEKETTSKKNSHKKTRPRLKNVDRSSAQHLEVTVGDLTVIITDFSAASADQHSQ

SEQ ID NO: 21565 - protein, 70 aa, Synthetic construct
PTQSKKEKKDKVEKEKSEKETTSKKNSHKKTRPRLKNVDRSSAQHLEVTVGDLTVIITDFKEKTKDQHSQ

SEQ ID NO: 21566 - protein, 70 aa, Synthetic construct
PTQSKKEKKDKVEKEKSEKETTSKKNSHKKTRPRLKNVDRSSAQHLEVTVGDLTVIITDFKEKTKSPPAS

SEQ ID NO: 21567 - protein, 70 aa, Synthetic construct
ELVNKSHMGYEQVREWFAERQRRSELGIELFEENEEEDEVIDDQEEDEEETDDSDTWEPPRHVKRKLSKS

SEQ ID NO: 21568 - protein, 70 aa, Synthetic construct
HKFLNSHMGYEQVREWFAERQRRSELGIELFEENEEEDEVIDDQEEDEEETDDSDTWEPPRHVKRKLSKS

SEQ ID NO: 21569 - protein, 70 aa, Synthetic construct
HKFLNEQDLDEQVREWFAERQRRSELGIELFEENEEEDEVIDDQEEDEEETDDSDTWEPPRHVKRKLSKS

SEQ ID NO: 21570 - protein, 70 aa, Synthetic construct
HKFLNEQDLDELVNKSHMGYEQVRELGIELFEENEEEDEVIDDQEEDEEETDDSDTWEPPRHVKRKLSKS

SEQ ID NO: 21571 - protein, 70 aa, Synthetic construct
HKFLNEQDLDELVNKSHMGYEQVREWFAERQRRSEEEDEVIDDQEEDEEETDDSDTWEPPRHVKRKLSKS

SEQ ID NO: 21572 - protein, 70 aa, Synthetic construct
HKFLNEQDLDELVNKSHMGYEQVREWFAERQRRSELGIELIDDQEEDEEETDDSDTWEPPRHVKRKLSKS

SEQ ID NO: 21573 - protein, 70 aa, Synthetic construct
HKFLNEQDLDELVNKSHMGYEQVREWFAERQRRSELGIELFEENEEDEEETDDSDTWEPPRHVKRKLSKS

SEQ ID NO: 21574 - protein, 70 aa, Synthetic construct
HKFLNEQDLDELVNKSHMGYEQVREWFAERQRRSELGIELFEENEEEDEVTDDSDTWEPPRHVKRKLSKS

SEQ ID NO: 21575 - protein, 70 aa, Synthetic construct
HKFLNEQDLDELVNKSHMGYEQVREWFAERQRRSELGIELFEENEEEDEVIDDQEEDEEETDDSDTWEPP

SEQ ID NO: 21576 - protein, 70 aa, Synthetic construct
EPLTFKDVAIEFSLEEWQCLDTAQRDLYRNVLLENYRNLVLITCLEQKKEPWNIKRHEMVAKPPVMSFHF

SEQ ID NO: 21577 - protein, 70 aa, Synthetic construct
EPLTFKDVAIEFSLEEWQCLDTAQRDLYRNVLLENYRNLVFLGIAEQKKEPWNIKRHEMVAKPPVMSFHF

SEQ ID NO: 21578 - protein, 70 aa, Synthetic construct
EPLTFKDVAIEFSLEEWQCLDTAQRDLYRNVLLENYRNLVFLGIAVSKPYPWNIKRHEMVAKPPVMSFHF

SEQ ID NO: 21579 - protein, 70 aa, Synthetic construct
EPLTFKDVAIEFSLEEWQCLDTAQRDLYRNVLLENYRNLVFLGIAVSKPYLITCLRHEMVAKPPVMSFHF

SEQ ID NO: 21580 - protein, 70 aa, Synthetic construct
EPLTFKDVAIEFSLEEWQCLDTAQRDLYRNVLLENYRNLVFLGIAVSKPYLITCLEQKKEAKPPVMSFHF

SEQ ID NO: 21581 - protein, 70 aa, Synthetic construct
EPLTFKDVAIEFSLEEWQCLDTAQRDLYRNVLLENYRNLVFLGIAVSKPYLITCLEQKKEPWNIKMSFHF

SEQ ID NO: 21582 - protein, 70 aa, Synthetic construct
EPLTFKDVAIEFSLEEWQCLDTAQRDLYRNVLLENYRNLVFLGIAVSKPYLITCLEQKKEPWNIKRHEMV

SEQ ID NO: 21583 - protein, 70 aa, Synthetic construct
IKPVTRNKAPQEPPVKKGRRSRRCGQCPGCQVPEDCGVCTNCLDKPKFGGRNIKKQCCKMRKCQNLQWMP

SEQ ID NO: 21584 - protein, 70 aa, Synthetic construct
AEPLARNKAPQEPPVKKGRRSRRCGQCPGCQVPEDCGVCTNCLDKPKFGGRNIKKQCCKMRKCQNLQWMP

SEQ ID NO: 21585 - protein, 70 aa, Synthetic construct
AEPLAPPIKPQEPPVKKGRRSRRCGQCPGCQVPEDCGVCTNCLDKPKFGGRNIKKQCCKMRKCQNLQWMP

SEQ ID NO: 21586 - protein, 70 aa, Synthetic construct
AEPLAPPIKPIKPVTKKGRRSRRCGQCPGCQVPEDCGVCTNCLDKPKFGGRNIKKQCCKMRKCQNLQWMP

SEQ ID NO: 21587 - protein, 70 aa, Synthetic construct
DFSLCNFCPLCDKCYDDDDYESKMMQCGKCDRWVHSKCENLSDEMYEILSNLPESVAYTCVNCTERHPAE

SEQ ID NO: 21588 - protein, 70 aa, Synthetic construct
DFSLCHDCAKLFAKGDDDDYESKMMQCGKCDRWVHSKCENLSDEMYEILSNLPESVAYTCVNCTERHPAE

SEQ ID NO: 21589 - protein, 70 aa, Synthetic construct
DFSLCHDCAKLFAKGNFCPLESKMMQCGKCDRWVHSKCENLSDEMYEILSNLPESVAYTCVNCTERHPAE

SEQ ID NO: 21590 - protein, 70 aa, Synthetic construct
DFSLCHDCAKLFAKGNFCPLCDKCYQCGKCDRWVHSKCENLSDEMYEILSNLPESVAYTCVNCTERHPAE

SEQ ID NO: 21591 - protein, 70 aa, Synthetic construct
DFSLCHDCAKLFAKGNFCPLCDKCYDDDDYDRWVHSKCENLSDEMYEILSNLPESVAYTCVNCTERHPAE

SEQ ID NO: 21592 - protein, 70 aa, Synthetic construct
DFSLCHDCAKLFAKGNFCPLCDKCYDDDDYESKMMSKCENLSDEMYEILSNLPESVAYTCVNCTERHPAE

SEQ ID NO: 21593 - protein, 70 aa, Synthetic construct
DFSLCHDCAKLFAKGNFCPLCDKCYDDDDYESKMMQCGKCLSDEMYEILSNLPESVAYTCVNCTERHPAE

SEQ ID NO: 21594 - protein, 70 aa, Synthetic construct
DFSLCHDCAKLFAKGNFCPLCDKCYDDDDYESKMMQCGKCDRWVHYEILSNLPESVAYTCVNCTERHPAE

SEQ ID NO: 21595 - protein, 70 aa, Synthetic construct
DFSLCHDCAKLFAKGNFCPLCDKCYDDDDYESKMMQCGKCDRWVHSKCENNLPESVAYTCVNCTERHPAE

SEQ ID NO: 21596 - protein, 70 aa, Synthetic construct
DFSLCHDCAKLFAKGNFCPLCDKCYDDDDYESKMMQCGKCDRWVHSKCENLSDEMVAYTCVNCTERHPAE

SEQ ID NO: 21597 - protein, 70 aa, Synthetic construct
DFSLCHDCAKLFAKGNFCPLCDKCYDDDDYESKMMQCGKCDRWVHSKCENLSDEMYEILSVNCTERHPAE

SEQ ID NO: 21598 - protein, 70 aa, Synthetic construct
DFSLCHDCAKLFAKGNFCPLCDKCYDDDDYESKMMQCGKCDRWVHSKCENLSDEMYEILSNLPESRHPAE

SEQ ID NO: 21599 - protein, 70 aa, Synthetic construct
DFSLCHDCAKLFAKGNFCPLCDKCYDDDDYESKMMQCGKCDRWVHSKCENLSDEMYEILSNLPESVAYTC

SEQ ID NO: 21600 - protein, 70 aa, Synthetic construct
KVKGEKLDKKLKKMEQNKTAATRYRQKKRAEQEALNEALKERADSLAKEIQYLKDLIEEVRKARGKKRVP

SEQ ID NO: 21601 - protein, 70 aa, Synthetic construct
KVKGEKLDKKLKKMEQNKTAATRYRQKKRAEQEALTGECKERADSLAKEIQYLKDLIEEVRKARGKKRVP

SEQ ID NO: 21602 - protein, 70 aa, Synthetic construct
KKHVGGRVMVTDADRSILSPGGSCGPIKVKTEPTEDSGISLEMAAVTVKEESEDPDYYQYNIQAGPSETD

SEQ ID NO: 21603 - protein, 70 aa, Synthetic construct
FIIKRGRVMVTDADRSILSPGGSCGPIKVKTEPTEDSGISLEMAAVTVKEESEDPDYYQYNIQAGPSETD

SEQ ID NO: 21604 - protein, 70 aa, Synthetic construct
FIIKRPFLEPTDADRSILSPGGSCGPIKVKTEPTEDSGISLEMAAVTVKEESEDPDYYQYNIQAGPSETD

SEQ ID NO: 21605 - protein, 70 aa, Synthetic construct
FIIKRPFLEPKKHVGSILSPGGSCGPIKVKTEPTEDSGISLEMAAVTVKEESEDPDYYQYNIQAGPSETD

SEQ ID NO: 21606 - protein, 70 aa, Synthetic construct
FIIKRPFLEPKKHVGGRVMVGGSCGPIKVKTEPTEDSGISLEMAAVTVKEESEDPDYYQYNIQAGPSETD

SEQ ID NO: 21607 - protein, 70 aa, Synthetic construct
FIIKRPFLEPKKHVGGRVMVTDADRPIKVKTEPTEDSGISLEMAAVTVKEESEDPDYYQYNIQAGPSETD

SEQ ID NO: 21608 - protein, 70 aa, Synthetic construct
FIIKRPFLEPKKHVGGRVMVTDADRSILSPTEPTEDSGISLEMAAVTVKEESEDPDYYQYNIQAGPSETD

SEQ ID NO: 21609 - protein, 70 aa, Synthetic construct
FIIKRPFLEPKKHVGGRVMVTDADRSILSPGGSCGDSGISLEMAAVTVKEESEDPDYYQYNIQAGPSETD

SEQ ID NO: 21610 - protein, 70 aa, Synthetic construct
FIIKRPFLEPKKHVGGRVMVTDADRSILSPGGSCGPIKVKLEMAAVTVKEESEDPDYYQYNIQAGPSETD

SEQ ID NO: 21611 - protein, 70 aa, Synthetic construct
FIIKRPFLEPKKHVGGRVMVTDADRSILSPGGSCGPIKVKTEPTEVTVKEESEDPDYYQYNIQAGPSETD

SEQ ID NO: 21612 - protein, 70 aa, Synthetic construct
FIIKRPFLEPKKHVGGRVMVTDADRSILSPGGSCGPIKVKTEPTEDSGISESEDPDYYQYNIQAGPSETD

SEQ ID NO: 21613 - protein, 70 aa, Synthetic construct
FIIKRPFLEPKKHVGGRVMVTDADRSILSPGGSCGPIKVKTEPTEDSGISLEMAADYYQYNIQAGPSETD

SEQ ID NO: 21614 - protein, 70 aa, Synthetic construct
FIIKRPFLEPKKHVGGRVMVTDADRSILSPGGSCGPIKVKTEPTEDSGISLEMAAVTVKENIQAGPSETD

SEQ ID NO: 21615 - protein, 70 aa, Synthetic construct
FIIKRPFLEPKKHVGGRVMVTDADRSILSPGGSCGPIKVKTEPTEDSGISLEMAAVTVKEESEDPPSETD

SEQ ID NO: 21616 - protein, 70 aa, Synthetic construct
FIIKRPFLEPKKHVGGRVMVTDADRSILSPGGSCGPIKVKTEPTEDSGISLEMAAVTVKEESEDPDYYQY

SEQ ID NO: 21617 - protein, 70 aa, Synthetic construct
ARSTRKKRCPYTKYQTLELEKEFLFNMYLTRDRRYEVARILNLTERQVKIWFQNRRMKMKKMSKEKCPKG

SEQ ID NO: 21618 - protein, 70 aa, Synthetic construct
PNNPAANWIHARSTRTLELEKEFLFNMYLTRDRRYEVARILNLTERQVKIWFQNRRMKMKKMSKEKCPKG

SEQ ID NO: 21619 - protein, 70 aa, Synthetic construct
VPNGDSQSGVDSLRKHLRADDRVFERPSYPDVFQASEHIKSEQGNEYSLPALTPGLDEVKSSLSASTNPE

SEQ ID NO: 21620 - protein, 70 aa, Synthetic construct
VPNGDSQSGVDSLRKHLRADTFTQQQLEALDRVFERPSYPDVFQASEHIKSEQGNEYSLPALTPGLDEVK

SEQ ID NO: 21621 - protein, 70 aa, Synthetic construct
STLTLLTRAEAGSPTGGLFNTPPPTPPEQDKEDFSSFQLLVEVALQRAAEMELQKQQDPSLPLLHTPIPL

SEQ ID NO: 21622 - protein, 70 aa, Synthetic construct
ESPKPLTRAEAGSPTGGLFNTPPPTPPEQDKEDFSSFQLLVEVALQRAAEMELQKQQDPSLPLLHTPIPL

SEQ ID NO: 21623 - protein, 70 aa, Synthetic construct
ESPKPLVTPGAGSPTGGLFNTPPPTPPEQDKEDFSSFQLLVEVALQRAAEMELQKQQDPSLPLLHTPIPL

SEQ ID NO: 21624 - protein, 70 aa, Synthetic construct
ESPKPLVTPGSTLTLGGLFNTPPPTPPEQDKEDFSSFQLLVEVALQRAAEMELQKQQDPSLPLLHTPIPL

SEQ ID NO: 21625 - protein, 70 aa, Synthetic construct
ESPKPLVTPGSTLTLLTRAETPPPTPPEQDKEDFSSFQLLVEVALQRAAEMELQKQQDPSLPLLHTPIPL

SEQ ID NO: 21626 - protein, 70 aa, Synthetic construct
ESPKPLVTPGSTLTLLTRAEAGSPTPPEQDKEDFSSFQLLVEVALQRAAEMELQKQQDPSLPLLHTPIPL

SEQ ID NO: 21627 - protein, 70 aa, Synthetic construct
ESPKPLVTPGSTLTLLTRAEAGSPTGGLFNKEDFSSFQLLVEVALQRAAEMELQKQQDPSLPLLHTPIPL

SEQ ID NO: 21628 - protein, 70 aa, Synthetic construct
ESPKPLVTPGSTLTLLTRAEAGSPTGGLFNTPPPTSFQLLVEVALQRAAEMELQKQQDPSLPLLHTPIPL

SEQ ID NO: 21629 - protein, 70 aa, Synthetic construct
ESPKPLVTPGSTLTLLTRAEAGSPTGGLFNTPPPTPPEQDKEDFSSFQLLVEVALQQDPSLPLLHTPIPL

SEQ ID NO: 21630 - protein, 70 aa, Synthetic construct
ESPKPLVTPGSTLTLLTRAEAGSPTGGLFNTPPPTPPEQDKEDFSSFQLLVEVALQRAAELPLLHTPIPL

SEQ ID NO: 21631 - protein, 70 aa, Synthetic construct
ESPKPLVTPGSTLTLLTRAEAGSPTGGLFNTPPPTPPEQDKEDFSSFQLLVEVALQRAAEMELQKTPIPL

SEQ ID NO: 21632 - protein, 70 aa, Synthetic construct
ESPKPLVTPGSTLTLLTRAEAGSPTGGLFNTPPPTPPEQDKEDFSSFQLLVEVALQRAAEMELQKQQDPS

SEQ ID NO: 21633 - protein, 70 aa, Synthetic construct
CFKERTRSLLREWYLQDPYPNPSKKRELAQATGLTPTQVGNWFKNRRQRDRAAAAKNRLQHQAIGPSGMR

SEQ ID NO: 21634 - protein, 70 aa, Synthetic construct
TIWDGEQKTHCFKERTRSLLREWYLQDPYPNPSKKRELAQATGLTPTQVGNWFKNRRQRDRAAAAKNRLQ

SEQ ID NO: 21635 - protein, 70 aa, Synthetic construct
LEKADSESNKGKKRRNRTTFTSYQLEELEKVFQKTHYPDVYAREQLAMRTDLTEARVQVWFQNRRAKWRK

SEQ ID NO: 21636 - protein, 70 aa, Synthetic construct
DRASSSESNKGKKRRNRTTFTSYQLEELEKVFQKTHYPDVYAREQLAMRTDLTEARVQVWFQNRRAKWRK

SEQ ID NO: 21637 - protein, 70 aa, Synthetic construct
DRASSDLPSPGKKRRNRTTFTSYQLEELEKVFQKTHYPDVYAREQLAMRTDLTEARVQVWFQNRRAKWRK

SEQ ID NO: 21638 - protein, 70 aa, Synthetic construct
SCHSQMHRPIKVEPGPPENKTWKKVTKQENPPASCDNVQQKSIIETMEQHLKQFHAKSLFDHKALTLKSQ

SEQ ID NO: 21639 - protein, 70 aa, Synthetic construct
SCHSQMHRPIKVEPGCKPHATWKKVTKQENPPASCDNVQQKSIIETMEQHLKQFHAKSLFDHKALTLKSQ

SEQ ID NO: 21640 - protein, 70 aa, Synthetic construct
SCHSQMHRPIKVEPGCKPHACMHTATKQENPPASCDNVQQKSIIETMEQHLKQFHAKSLFDHKALTLKSQ

SEQ ID NO: 21641 - protein, 70 aa, Synthetic construct
SCHSQMHRPIKVEPGCKPHACMHTAPPENKPPASCDNVQQKSIIETMEQHLKQFHAKSLFDHKALTLKSQ

SEQ ID NO: 21642 - protein, 70 aa, Synthetic construct
SCHSQMHRPIKVEPGCKPHACMHTAPPENKTWKKVDNVQQKSIIETMEQHLKQFHAKSLFDHKALTLKSQ

SEQ ID NO: 21643 - protein, 70 aa, Synthetic construct
SCHSQMHRPIKVEPGCKPHACMHTAPPENKTWKKVTKQENKSIIETMEQHLKQFHAKSLFDHKALTLKSQ

SEQ ID NO: 21644 - protein, 70 aa, Synthetic construct
SCHSQMHRPIKVEPGCKPHACMHTAPPENKTWKKVTKQENPPASCTMEQHLKQFHAKSLFDHKALTLKSQ

SEQ ID NO: 21645 - protein, 70 aa, Synthetic construct
SCHSQMHRPIKVEPGCKPHACMHTAPPENKTWKKVTKQENPPASCDNVQQLKQFHAKSLFDHKALTLKSQ

SEQ ID NO: 21646 - protein, 70 aa, Synthetic construct
SCHSQMHRPIKVEPGCKPHACMHTAPPENKTWKKVTKQENPPASCDNVQQKSIIEAKSLFDHKALTLKSQ

SEQ ID NO: 21647 - protein, 70 aa, Synthetic construct
SCHSQMHRPIKVEPGCKPHACMHTAPPENKTWKKVTKQENPPASCDNVQQKSIIETMEQHDHKALTLKSQ

SEQ ID NO: 21648 - protein, 70 aa, Synthetic construct
SCHSQMHRPIKVEPGCKPHACMHTAPPENKTWKKVTKQENPPASCDNVQQKSIIETMEQHLKQFHTLKSQ

SEQ ID NO: 21649 - protein, 70 aa, Synthetic construct
SCHSQMHRPIKVEPGCKPHACMHTAPPENKTWKKVTKQENPPASCDNVQQKSIIETMEQHLKQFHAKSLF

SEQ ID NO: 21650 - protein, 70 aa, Synthetic construct
CEKYGPDYVPQKSHGKKVKREPAEPHETSEPTYLRFIKSLAERTMSVTTDSTVTTSPYAFTRVTGPYNRY

SEQ ID NO: 21651 - protein, 70 aa, Synthetic construct
AEKARPDYVPQKSHGKKVKREPAEPHETSEPTYLRFIKSLAERTMSVTTDSTVTTSPYAFTRVTGPYNRY

SEQ ID NO: 21652 - protein, 70 aa, Synthetic construct
AEKAREKEEEQKSHGKKVKREPAEPHETSEPTYLRFIKSLAERTMSVTTDSTVTTSPYAFTRVTGPYNRY

SEQ ID NO: 21653 - protein, 70 aa, Synthetic construct
AEKAREKEEECEKYGKKVKREPAEPHETSEPTYLRFIKSLAERTMSVTTDSTVTTSPYAFTRVTGPYNRY

SEQ ID NO: 21654 - protein, 70 aa, Synthetic construct
AEKAREKEEECEKYGPDYVPEPAEPHETSEPTYLRFIKSLAERTMSVTTDSTVTTSPYAFTRVTGPYNRY

SEQ ID NO: 21655 - protein, 70 aa, Synthetic construct
AEKAREKEEECEKYGPDYVPQKSHGHETSEPTYLRFIKSLAERTMSVTTDSTVTTSPYAFTRVTGPYNRY

SEQ ID NO: 21656 - protein, 70 aa, Synthetic construct
AEKAREKEEECEKYGPDYVPQKSHGKKVKREPAEPFIKSLAERTMSVTTDSTVTTSPYAFTRVTGPYNRY

SEQ ID NO: 21657 - protein, 70 aa, Synthetic construct
AEKAREKEEECEKYGPDYVPQKSHGKKVKREPAEPHETSEAERTMSVTTDSTVTTSPYAFTRVTGPYNRY

SEQ ID NO: 21658 - protein, 70 aa, Synthetic construct
AEKAREKEEECEKYGPDYVPQKSHGKKVKREPAEPHETSEPTYLRSVTTDSTVTTSPYAFTRVTGPYNRY

SEQ ID NO: 21659 - protein, 70 aa, Synthetic construct
AEKAREKEEECEKYGPDYVPQKSHGKKVKREPAEPHETSEPTYLRFIKSLSTVTTSPYAFTRVTGPYNRY

SEQ ID NO: 21660 - protein, 70 aa, Synthetic construct
AEKAREKEEECEKYGPDYVPQKSHGKKVKREPAEPHETSEPTYLRFIKSLAERTMSPYAFTRVTGPYNRY

SEQ ID NO: 21661 - protein, 70 aa, Synthetic construct
AEKAREKEEECEKYGPDYVPQKSHGKKVKREPAEPHETSEPTYLRFIKSLAERTMSVTTDTRVTGPYNRY

SEQ ID NO: 21662 - protein, 70 aa, Synthetic construct
AEKAREKEEECEKYGPDYVPQKSHGKKVKREPAEPHETSEPTYLRFIKSLAERTMSVTTDSTVTTPYNRY

SEQ ID NO: 21663 - protein, 70 aa, Synthetic construct
AEKAREKEEECEKYGPDYVPQKSHGKKVKREPAEPHETSEPTYLRFIKSLAERTMSVTTDSTVTTSPYAF

SEQ ID NO: 21664 - protein, 70 aa, Synthetic construct
NIPLVAQELMKKMIRQFAIEYISKSGKTQEVCKSIQMNQAENSLQEEQEGPLDLTVNRMQEQNTQQGDGV

SEQ ID NO: 21665 - protein, 70 aa, Synthetic construct
NIPLVAQELMKKMIRQFAIEYISKSGKTQENRNGSIGPSIENSLQEEQEGPLDLTVNRMQEQNTQQGDGV

SEQ ID NO: 21666 - protein, 70 aa, Synthetic construct
NIPLVAQELMKKMIRQFAIEYISKSGKTQENRNGSIGPSIVCKSIEEQEGPLDLTVNRMQEQNTQQGDGV

SEQ ID NO: 21667 - protein, 70 aa, Synthetic construct
NIPLVAQELMKKMIRQFAIEYISKSGKTQENRNGSIGPSIVCKSIQMNQAENSLQEEQEGPLDLTVNRMQ

SEQ ID NO: 21668 - protein, 70 aa, Synthetic construct
ENSLQEEQEGPLDLTVNRMQEQNTQQGDGVLDLSTKKTSIKSEESSICDPSSENSVAGSTVDAKSEEATK

SEQ ID NO: 21669 - protein, 70 aa, Synthetic construct
VCKSIEEQEGPLDLTVNRMQEQNTQQGDGVLDLSTKKTSIKSEESSICDPSSENSVAGSTVDAKSEEATK

SEQ ID NO: 21670 - protein, 70 aa, Synthetic construct
VCKSIQMNQAPLDLTVNRMQEQNTQQGDGVLDLSTKKTSIKSEESSICDPSSENSVAGSTVDAKSEEATK

SEQ ID NO: 21671 - protein, 70 aa, Synthetic construct
VCKSIQMNQAENSLQVNRMQEQNTQQGDGVLDLSTKKTSIKSEESSICDPSSENSVAGSTVDAKSEEATK

SEQ ID NO: 21672 - protein, 70 aa, Synthetic construct
VCKSIQMNQAENSLQEEQEGEQNTQQGDGVLDLSTKKTSIKSEESSICDPSSENSVAGSTVDAKSEEATK

SEQ ID NO: 21673 - protein, 70 aa, Synthetic construct
VCKSIQMNQAENSLQEEQEGPLDLTQGDGVLDLSTKKTSIKSEESSICDPSSENSVAGSTVDAKSEEATK

SEQ ID NO: 21674 - protein, 70 aa, Synthetic construct
VCKSIQMNQAENSLQEEQEGPLDLTVNRMQLDLSTKKTSIKSEESSICDPSSENSVAGSTVDAKSEEATK

SEQ ID NO: 21675 - protein, 70 aa, Synthetic construct
VCKSIQMNQAENSLQEEQEGPLDLTVNRMQEQNTQQGDGVLDLSTKKTSISSENSVAGSTVDAKSEEATK

SEQ ID NO: 21676 - protein, 70 aa, Synthetic construct
VCKSIQMNQAENSLQEEQEGPLDLTVNRMQEQNTQQGDGVLDLSTKKTSIKSEESVAGSTVDAKSEEATK

SEQ ID NO: 21677 - protein, 70 aa, Synthetic construct
VCKSIQMNQAENSLQEEQEGPLDLTVNRMQEQNTQQGDGVLDLSTKKTSIKSEESSICDPVDAKSEEATK

SEQ ID NO: 21678 - protein, 70 aa, Synthetic construct
VCKSIQMNQAENSLQEEQEGPLDLTVNRMQEQNTQQGDGVLDLSTKKTSIKSEESSICDPSSENSEEATK

SEQ ID NO: 21679 - protein, 70 aa, Synthetic construct
VCKSIQMNQAENSLQEEQEGPLDLTVNRMQEQNTQQGDGVLDLSTKKTSIKSEESSICDPSSENSVAGST

SEQ ID NO: 21680 - protein, 70 aa, Synthetic construct
HQDSTLKEDVPEQGKDDVREVKVEQNSEPCAGSSSESDLQTVFKNESLNAESKSGCKLQELKAKQLIKKD

SEQ ID NO: 21681 - protein, 70 aa, Synthetic construct
QEVIKLKEDVPEQGKDDVREVKVEQNSEPCAGSSSESDLQTVFKNESLNAESKSGCKLQELKAKQLIKKD

SEQ ID NO: 21682 - protein, 70 aa, Synthetic construct
QEVIKPENGEHQDSTDDVREVKVEQNSEPCAGSSSESDLQTVFKNESLNAESKSGCKLQELKAKQLIKKD

SEQ ID NO: 21683 - protein, 70 aa, Synthetic construct
QEVIKPENGEHQDSTLKEDVVKVEQNSEPCAGSSSESDLQTVFKNESLNAESKSGCKLQELKAKQLIKKD

SEQ ID NO: 21684 - protein, 70 aa, Synthetic construct
QEVIKPENGEHQDSTLKEDVPEQGKDDVREVKVEQESDLQTVFKNESLNAESKSGCKLQELKAKQLIKKD

SEQ ID NO: 21685 - protein, 70 aa, Synthetic construct
QEVIKPENGEHQDSTLKEDVPEQGKDDVREVKVEQNSEPCAGSSSESLNAESKSGCKLQELKAKQLIKKD

SEQ ID NO: 21686 - protein, 70 aa, Synthetic construct
QEVIKPENGEHQDSTLKEDVPEQGKDDVREVKVEQNSEPCAGSSSESDLQESKSGCKLQELKAKQLIKKD

SEQ ID NO: 21687 - protein, 70 aa, Synthetic construct
QEVIKPENGEHQDSTLKEDVPEQGKDDVREVKVEQNSEPCAGSSSESDLQTVFKNESLNAESKSGLIKKD

SEQ ID NO: 21688 - protein, 70 aa, Synthetic construct
QEVIKPENGEHQDSTLKEDVPEQGKDDVREVKVEQNSEPCAGSSSESDLQTVFKNESLNAESKSGCKLQE

SEQ ID NO: 21689 - protein, 70 aa, Synthetic construct
TDKELSDLLDFSAMFSPPVSSGKNGPTSLASGHFTGSNVEDRSSSGSWGNGGHPSPSRNYGDGTPYDHMT

SEQ ID NO: 21690 - protein, 70 aa, Synthetic construct
HHQQRMAALGTDKELSDLLDFSAMFSPPVSSGHFTGSNVEDRSSSGSWGNGGHPSPSRNYGDGTPYDHMT

SEQ ID NO: 21691 - protein, 70 aa, Synthetic construct
HHQQRMAALGTDKELSDLLDFSAMFSPPVSSGKNGGSNVEDRSSSGSWGNGGHPSPSRNYGDGTPYDHMT

SEQ ID NO: 21692 - protein, 70 aa, Synthetic construct
HHQQRMAALGTDKELSDLLDFSAMFSPPVSSGKNGPTSLADRSSSGSWGNGGHPSPSRNYGDGTPYDHMT

SEQ ID NO: 21693 - protein, 70 aa, Synthetic construct
HHQQRMAALGTDKELSDLLDFSAMFSPPVSSGKNGPTSLASGHFTGSWGNGGHPSPSRNYGDGTPYDHMT

SEQ ID NO: 21694 - protein, 70 aa, Synthetic construct
HHQQRMAALGTDKELSDLLDFSAMFSPPVSSGKNGPTSLASGHFTGSNVEGGHPSPSRNYGDGTPYDHMT

SEQ ID NO: 21695 - protein, 70 aa, Synthetic construct
HHQQRMAALGTDKELSDLLDFSAMFSPPVSSGKNGPTSLASGHFTGSNVEDRSSSPSRNYGDGTPYDHMT

SEQ ID NO: 21696 - protein, 70 aa, Synthetic construct
HHQQRMAALGTDKELSDLLDFSAMFSPPVSSGKNGPTSLASGHFTGSNVEDRSSSGSWGNGDGTPYDHMT

SEQ ID NO: 21697 - protein, 70 aa, Synthetic construct
HHQQRMAALGTDKELSDLLDFSAMFSPPVSSGKNGPTSLASGHFTGSNVEDRSSSGSWGNGGHPSYDHMT

SEQ ID NO: 21698 - protein, 70 aa, Synthetic construct
HHQQRMAALGTDKELSDLLDFSAMFSPPVSSGKNGPTSLASGHFTGSNVEDRSSSGSWGNGGHPSPSRNY

SEQ ID NO: 21699 - protein, 70 aa, Synthetic construct
IKTEDFLSYGSSFSTSPTGQSPYTYQMHGTTGFYQGGNGLGNAAGFGSVHQDYPSYPGFPQSQYPQYYGS

SEQ ID NO: 21700 - protein, 70 aa, Synthetic construct
IKTEDSLNHSSSFSTSPTGQSPYTYQMHGTTGFYQGGNGLGNAAGFGSVHQDYPSYPGFPQSQYPQYYGS

SEQ ID NO: 21701 - protein, 70 aa, Synthetic construct
IKTEDSLNHSPGQSGSPTGQSPYTYQMHGTTGFYQGGNGLGNAAGFGSVHQDYPSYPGFPQSQYPQYYGS

SEQ ID NO: 21702 - protein, 70 aa, Synthetic construct
IKTEDSLNHSPGQSGFLSYGSPYTYQMHGTTGFYQGGNGLGNAAGFGSVHQDYPSYPGFPQSQYPQYYGS

SEQ ID NO: 21703 - protein, 70 aa, Synthetic construct
IKTEDSLNHSPGQSGFLSYGSSFSTQMHGTTGFYQGGNGLGNAAGFGSVHQDYPSYPGFPQSQYPQYYGS

SEQ ID NO: 21704 - protein, 70 aa, Synthetic construct
IKTEDSLNHSPGQSGFLSYGSSFSTSPTGQTGFYQGGNGLGNAAGFGSVHQDYPSYPGFPQSQYPQYYGS

SEQ ID NO: 21705 - protein, 70 aa, Synthetic construct
IKTEDSLNHSPGQSGFLSYGSSFSTSPTGQSPYTYGGNGLGNAAGFGSVHQDYPSYPGFPQSQYPQYYGS

SEQ ID NO: 21706 - protein, 70 aa, Synthetic construct
IKTEDSLNHSPGQSGFLSYGSSFSTSPTGQSPYTYQMHGTGNAAGFGSVHQDYPSYPGFPQSQYPQYYGS

SEQ ID NO: 21707 - protein, 70 aa, Synthetic construct
IKTEDSLNHSPGQSGFLSYGSSFSTSPTGQSPYTYQMHGTTGFYQFGSVHQDYPSYPGFPQSQYPQYYGS

SEQ ID NO: 21708 - protein, 70 aa, Synthetic construct
IKTEDSLNHSPGQSGFLSYGSSFSTSPTGQSPYTYQMHGTTGFYQGGNGLQDYPSYPGFPQSQYPQYYGS

SEQ ID NO: 21709 - protein, 70 aa, Synthetic construct
IKTEDSLNHSPGQSGFLSYGSSFSTSPTGQSPYTYQMHGTTGFYQGGNGLGNAAGYPGFPQSQYPQYYGS

SEQ ID NO: 21710 - protein, 70 aa, Synthetic construct
IKTEDSLNHSPGQSGFLSYGSSFSTSPTGQSPYTYQMHGTTGFYQGGNGLGNAAGFGSVHQSQYPQYYGS

SEQ ID NO: 21711 - protein, 70 aa, Synthetic construct
IKTEDSLNHSPGQSGFLSYGSSFSTSPTGQSPYTYQMHGTTGFYQGGNGLGNAAGFGSVHQDYPSQYYGS

SEQ ID NO: 21712 - protein, 70 aa, Synthetic construct
IKTEDSLNHSPGQSGFLSYGSSFSTSPTGQSPYTYQMHGTTGFYQGGNGLGNAAGFGSVHQDYPSYPGFP

SEQ ID NO: 21713 - protein, 70 aa, Synthetic construct
AQTLAQAQAQVQAHLQQELQQQAALIQSQLFNPTLLPHFPMTTETLLQLQQQQHLLFPFYIPSAEFQLNP

SEQ ID NO: 21714 - protein, 70 aa, Synthetic construct
QQQQQQAQAQVQAHLQQELQQQAALIQSQLFNPTLLPHFPMTTETLLQLQQQQHLLFPFYIPSAEFQLNP

SEQ ID NO: 21715 - protein, 70 aa, Synthetic construct
QQQQQQQQQQVQAHLQQELQQQAALIQSQLFNPTLLPHFPMTTETLLQLQQQQHLLFPFYIPSAEFQLNP

SEQ ID NO: 21716 - protein, 70 aa, Synthetic construct
QQQQQQQQQQAQTLAQQELQQQAALIQSQLFNPTLLPHFPMTTETLLQLQQQQHLLFPFYIPSAEFQLNP

SEQ ID NO: 21717 - protein, 70 aa, Synthetic construct
QQQQQQQQQQAQTLAQAQAQQQAALIQSQLFNPTLLPHFPMTTETLLQLQQQQHLLFPFYIPSAEFQLNP

SEQ ID NO: 21718 - protein, 70 aa, Synthetic construct
QQQQQQQQQQAQTLAQAQAQVQAHLIQSQLFNPTLLPHFPMTTETLLQLQQQQHLLFPFYIPSAEFQLNP

SEQ ID NO: 21719 - protein, 70 aa, Synthetic construct
QQQQQQQQQQAQTLAQAQAQVQAHLQQELQFNPTLLPHFPMTTETLLQLQQQQHLLFPFYIPSAEFQLNP

SEQ ID NO: 21720 - protein, 70 aa, Synthetic construct
QQQQQQQQQQAQTLAQAQAQVQAHLQQELQQQAALLPHFPMTTETLLQLQQQQHLLFPFYIPSAEFQLNP

SEQ ID NO: 21721 - protein, 70 aa, Synthetic construct
QQQQQQQQQQAQTLAQAQAQVQAHLQQELQQQAALIQSQLMTTETLLQLQQQQHLLFPFYIPSAEFQLNP

SEQ ID NO: 21722 - protein, 70 aa, Synthetic construct
QQQQQQQQQQAQTLAQAQAQVQAHLQQELQQQAALIQSQLFNPTLLLQLQQQQHLLFPFYIPSAEFQLNP

SEQ ID NO: 21723 - protein, 70 aa, Synthetic construct
QQQQQQQQQQAQTLAQAQAQVQAHLQQELQQQAALIQSQLFNPTLLPHFPQQQHLLFPFYIPSAEFQLNP

SEQ ID NO: 21724 - protein, 70 aa, Synthetic construct
QQQQQQQQQQAQTLAQAQAQVQAHLQQELQQQAALIQSQLFNPTLLPHFPMTTETLLQLQQQQHLLFPFY

SEQ ID NO: 21725 - protein, 70 aa, Synthetic construct
ISAPLPTMEYAVDPAQLQALQAALTSDPTALLTSQFLPYFVPGFSPYYAPQIPGALQSGYLQPMYGMEGL

SEQ ID NO: 21726 - protein, 70 aa, Synthetic construct
GEAPTPTMEYAVDPAQLQALQAALTSDPTALLTSQFLPYFVPGFSPYYAPQIPGALQSGYLQPMYGMEGL

SEQ ID NO: 21727 - protein, 70 aa, Synthetic construct
GEAPTATAATAVDPAQLQALQAALTSDPTALLTSQFLPYFVPGFSPYYAPQIPGALQSGYLQPMYGMEGL

SEQ ID NO: 21728 - protein, 70 aa, Synthetic construct
GEAPTATAATISAPLQLQALQAALTSDPTALLTSQFLPYFVPGFSPYYAPQIPGALQSGYLQPMYGMEGL

SEQ ID NO: 21729 - protein, 70 aa, Synthetic construct
GEAPTATAATISAPLPTMEYQAALTSDPTALLTSQFLPYFVPGFSPYYAPQIPGALQSGYLQPMYGMEGL

SEQ ID NO: 21730 - protein, 70 aa, Synthetic construct
GEAPTATAATISAPLPTMEYAVDPASDPTALLTSQFLPYFVPGFSPYYAPQIPGALQSGYLQPMYGMEGL

SEQ ID NO: 21731 - protein, 70 aa, Synthetic construct
GEAPTATAATISAPLPTMEYAVDPAQLQALLLTSQFLPYFVPGFSPYYAPQIPGALQSGYLQPMYGMEGL

SEQ ID NO: 21732 - protein, 70 aa, Synthetic construct
GEAPTATAATISAPLPTMEYAVDPAQLQALQAALTFLPYFVPGFSPYYAPQIPGALQSGYLQPMYGMEGL

SEQ ID NO: 21733 - protein, 70 aa, Synthetic construct
GEAPTATAATISAPLPTMEYAVDPAQLQALQAALTSDPTALLTSQFLPYFQIPGALQSGYLQPMYGMEGL

SEQ ID NO: 21734 - protein, 70 aa, Synthetic construct
GEAPTATAATISAPLPTMEYAVDPAQLQALQAALTSDPTALLTSQFLPYFVPGFSLQSGYLQPMYGMEGL

SEQ ID NO: 21735 - protein, 70 aa, Synthetic construct
GEAPTATAATISAPLPTMEYAVDPAQLQALQAALTSDPTALLTSQFLPYFVPGFSPYYAPLQPMYGMEGL

SEQ ID NO: 21736 - protein, 70 aa, Synthetic construct
GEAPTATAATISAPLPTMEYAVDPAQLQALQAALTSDPTALLTSQFLPYFVPGFSPYYAPQIPGAGMEGL

SEQ ID NO: 21737 - protein, 70 aa, Synthetic construct
GEAPTATAATISAPLPTMEYAVDPAQLQALQAALTSDPTALLTSQFLPYFVPGFSPYYAPQIPGALQSGY

SEQ ID NO: 21738 - protein, 70 aa, Synthetic construct
DGLALLAAVLRHWLAATNFLSLVQLQLLPQGPLVQYLTMETCEDGNDLVFFYQVCEGVAKASHASHTAAQ

SEQ ID NO: 21739 - protein, 70 aa, Synthetic construct
DGLALLAAVLRHWLARGPTCPHIFVATNFLSLVQLQLLPQTCEDGNDLVFFYQVCEGVAKASHASHTAAQ

SEQ ID NO: 21740 - protein, 70 aa, Synthetic construct
APQRSRKKRCPYTKYQIRELEREFFFNVYINKEKRLQLSRMLNLTDRQVKIWFQNRRMKEKKLNRDRLQY

SEQ ID NO: 21741 - protein, 70 aa, Synthetic construct
AGAEKRKKRCPYTKYQIRELEREFFFNVYINKEKRLQLSRMLNLTDRQVKIWFQNRRMKEKKLNRDRLQY

SEQ ID NO: 21742 - protein, 70 aa, Synthetic construct
AGAEKSSSAVAPQRSQIRELEREFFFNVYINKEKRLQLSRMLNLTDRQVKIWFQNRRMKEKKLNRDRLQY

SEQ ID NO: 21743 - protein, 70 aa, Synthetic construct
AGAEKSSSAVAPQRSRKKRCPYTKYQIRELEREFFFNVYIMLNLTDRQVKIWFQNRRMKEKKLNRDRLQY

SEQ ID NO: 21744 - protein, 70 aa, Synthetic construct
AGAEKSSSAVAPQRSRKKRCPYTKYQIRELEREFFFNVYINKEKRLQLSRIWFQNRRMKEKKLNRDRLQY

SEQ ID NO: 21745 - protein, 70 aa, Synthetic construct
AGAEKSSSAVAPQRSRKKRCPYTKYQIRELEREFFFNVYINKEKRLQLSRMLNLTDRQVKIWFQNRRMKE

SEQ ID NO: 21746 - protein, 70 aa, Synthetic construct
QLSEPCPPYPQQSFKQEYHDPLYEQAGQPAVDQGGVNGHRYPGAGVVIKQEQTDFAYDSDVTGCASMYLH

SEQ ID NO: 21747 - protein, 70 aa, Synthetic construct
REPLPCPPYPQQSFKQEYHDPLYEQAGQPAVDQGGVNGHRYPGAGVVIKQEQTDFAYDSDVTGCASMYLH

SEQ ID NO: 21748 - protein, 70 aa, Synthetic construct
REPLPAPYQHQQSFKQEYHDPLYEQAGQPAVDQGGVNGHRYPGAGVVIKQEQTDFAYDSDVTGCASMYLH

SEQ ID NO: 21749 - protein, 70 aa, Synthetic construct
REPLPAPYQHQLSEPQEYHDPLYEQAGQPAVDQGGVNGHRYPGAGVVIKQEQTDFAYDSDVTGCASMYLH

SEQ ID NO: 21750 - protein, 70 aa, Synthetic construct
REPLPAPYQHQLSEPCPPYPPLYEQAGQPAVDQGGVNGHRYPGAGVVIKQEQTDFAYDSDVTGCASMYLH

SEQ ID NO: 21751 - protein, 70 aa, Synthetic construct
REPLPAPYQHQLSEPCPPYPQQSFKAGQPAVDQGGVNGHRYPGAGVVIKQEQTDFAYDSDVTGCASMYLH

SEQ ID NO: 21752 - protein, 70 aa, Synthetic construct
REPLPAPYQHQLSEPCPPYPQQSFKQEYHDVDQGGVNGHRYPGAGVVIKQEQTDFAYDSDVTGCASMYLH

SEQ ID NO: 21753 - protein, 70 aa, Synthetic construct
REPLPAPYQHQLSEPCPPYPQQSFKQEYHDPLYEQVNGHRYPGAGVVIKQEQTDFAYDSDVTGCASMYLH

SEQ ID NO: 21754 - protein, 70 aa, Synthetic construct
REPLPAPYQHQLSEPCPPYPQQSFKQEYHDPLYEQAGQPAYPGAGVVIKQEQTDFAYDSDVTGCASMYLH

SEQ ID NO: 21755 - protein, 70 aa, Synthetic construct
REPLPAPYQHQLSEPCPPYPQQSFKQEYHDPLYEQAGQPAVDQGGVVIKQEQTDFAYDSDVTGCASMYLH

SEQ ID NO: 21756 - protein, 70 aa, Synthetic construct
REPLPAPYQHQLSEPCPPYPQQSFKQEYHDPLYEQAGQPAVDQGGVNGHREQTDFAYDSDVTGCASMYLH

SEQ ID NO: 21757 - protein, 70 aa, Synthetic construct
REPLPAPYQHQLSEPCPPYPQQSFKQEYHDPLYEQAGQPAVDQGGVNGHRYPGAGAYDSDVTGCASMYLH

SEQ ID NO: 21758 - protein, 70 aa, Synthetic construct
REPLPAPYQHQLSEPCPPYPQQSFKQEYHDPLYEQAGQPAVDQGGVNGHRYPGAGVVIKQVTGCASMYLH

SEQ ID NO: 21759 - protein, 70 aa, Synthetic construct
REPLPAPYQHQLSEPCPPYPQQSFKQEYHDPLYEQAGQPAVDQGGVNGHRYPGAGVVIKQEQTDFSMYLH

SEQ ID NO: 21760 - protein, 70 aa, Synthetic construct
REPLPAPYQHQLSEPCPPYPQQSFKQEYHDPLYEQAGQPAVDQGGVNGHRYPGAGVVIKQEQTDFAYDSD

SEQ ID NO: 21761 - protein, 70 aa, Synthetic construct
YPGAGVVIKQVTGCASMYLHTEGFSGPSPGDGAMGYGYEKPLRPFPDDVCVVPEKFEGDIKQEGVGAFRE

SEQ ID NO: 21762 - protein, 70 aa, Synthetic construct
YPGAGVVIKQEQTDFSMYLHTEGFSGPSPGDGAMGYGYEKPLRPFPDDVCVVPEKFEGDIKQEGVGAFRE

SEQ ID NO: 21763 - protein, 70 aa, Synthetic construct
YPGAGVVIKQEQTDFAYDSDTEGFSGPSPGDGAMGYGYEKPLRPFPDDVCVVPEKFEGDIKQEGVGAFRE

SEQ ID NO: 21764 - protein, 70 aa, Synthetic construct
YPGAGVVIKQEQTDFAYDSDVTGCAGPSPGDGAMGYGYEKPLRPFPDDVCVVPEKFEGDIKQEGVGAFRE

SEQ ID NO: 21765 - protein, 70 aa, Synthetic construct
YPGAGVVIKQEQTDFAYDSDVTGCASMYLHDGAMGYGYEKPLRPFPDDVCVVPEKFEGDIKQEGVGAFRE

SEQ ID NO: 21766 - protein, 70 aa, Synthetic construct
YPGAGVVIKQEQTDFAYDSDVTGCASMYLHTEGFSYGYEKPLRPFPDDVCVVPEKFEGDIKQEGVGAFRE

SEQ ID NO: 21767 - protein, 70 aa, Synthetic construct
YPGAGVVIKQEQTDFAYDSDVTGCASMYLHTEGFSGPSPGPLRPFPDDVCVVPEKFEGDIKQEGVGAFRE

SEQ ID NO: 21768 - protein, 70 aa, Synthetic construct
YPGAGVVIKQEQTDFAYDSDVTGCASMYLHTEGFSGPSPGDGAMGPDDVCVVPEKFEGDIKQEGVGAFRE

SEQ ID NO: 21769 - protein, 70 aa, Synthetic construct
YPGAGVVIKQEQTDFAYDSDVTGCASMYLHTEGFSGPSPGDGAMGYGYEKVVPEKFEGDIKQEGVGAFRE

SEQ ID NO: 21770 - protein, 70 aa, Synthetic construct
YPGAGVVIKQEQTDFAYDSDVTGCASMYLHTEGFSGPSPGDGAMGYGYEKPLRPFFEGDIKQEGVGAFRE

SEQ ID NO: 21771 - protein, 70 aa, Synthetic construct
YPGAGVVIKQEQTDFAYDSDVTGCASMYLHTEGFSGPSPGDGAMGYGYEKPLRPFPDDVCKQEGVGAFRE

SEQ ID NO: 21772 - protein, 70 aa, Synthetic construct
YPGAGVVIKQEQTDFAYDSDVTGCASMYLHTEGFSGPSPGDGAMGYGYEKPLRPFPDDVCVVPEKGAFRE

SEQ ID NO: 21773 - protein, 70 aa, Synthetic construct
YPGAGVVIKQEQTDFAYDSDVTGCASMYLHTEGFSGPSPGDGAMGYGYEKPLRPFPDDVCVVPEKFEGDI

SEQ ID NO: 21774 - protein, 70 aa, Synthetic construct
VVEEDYNENAKNGEAKITEAPASEKEIVEVKEENIEDATEKGGEKKEAVAAEVKNEEEDQKEDEEKEDKD

SEQ ID NO: 21775 - protein, 70 aa, Synthetic construct
VVEEDYNENAKNGEAKITEAPASEKEIVEVKEENIEDATEKGGEKKEAVAAEVKNEEEDQKEDEEDQNEE

SEQ ID NO: 21776 - protein, 70 aa, Synthetic construct
HSSVRQVEDGLTFPDYSDSTEVKFEELKNVKLEEEDEEEEQAAAALDLSVNPASVGGRLVFSGSKKKSSS

SEQ ID NO: 21777 - protein, 70 aa, Synthetic construct
PAALAQVEDGLTFPDYSDSTEVKFEELKNVKLEEEDEEEEQAAAALDLSVNPASVGGRLVFSGSKKKSSS

SEQ ID NO: 21778 - protein, 70 aa, Synthetic construct
PAALAPVRPTLTFPDYSDSTEVKFEELKNVKLEEEDEEEEQAAAALDLSVNPASVGGRLVFSGSKKKSSS

SEQ ID NO: 21779 - protein, 70 aa, Synthetic construct
PAALAPVRPTHSSVRYSDSTEVKFEELKNVKLEEEDEEEEQAAAALDLSVNPASVGGRLVFSGSKKKSSS

SEQ ID NO: 21780 - protein, 70 aa, Synthetic construct
PAALAPVRPTHSSVRQVEDGEVKFEELKNVKLEEEDEEEEQAAAALDLSVNPASVGGRLVFSGSKKKSSS

SEQ ID NO: 21781 - protein, 70 aa, Synthetic construct
PAALAPVRPTHSSVRQVEDGLTFPDELKNVKLEEEDEEEEQAAAALDLSVNPASVGGRLVFSGSKKKSSS

SEQ ID NO: 21782 - protein, 70 aa, Synthetic construct
PAALAPVRPTHSSVRQVEDGLTFPDYSDSTEVKFEELKNVKLEEELDLSVNPASVGGRLVFSGSKKKSSS

SEQ ID NO: 21783 - protein, 70 aa, Synthetic construct
PAALAPVRPTHSSVRQVEDGLTFPDYSDSTEVKFEELKNVKLEEEDEEEENPASVGGRLVFSGSKKKSSS

SEQ ID NO: 21784 - protein, 70 aa, Synthetic construct
PAALAPVRPTHSSVRQVEDGLTFPDYSDSTEVKFEELKNVKLEEEDEEEEQAAAAGGRLVFSGSKKKSSS

SEQ ID NO: 21785 - protein, 70 aa, Synthetic construct
PAALAPVRPTHSSVRQVEDGLTFPDYSDSTEVKFEELKNVKLEEEDEEEEQAAAALDLSVFSGSKKKSSS

SEQ ID NO: 21786 - protein, 70 aa, Synthetic construct
PAALAPVRPTHSSVRQVEDGLTFPDYSDSTEVKFEELKNVKLEEEDEEEEQAAAALDLSVNPASVKKSSS

SEQ ID NO: 21787 - protein, 70 aa, Synthetic construct
PAALAPVRPTHSSVRQVEDGLTFPDYSDSTEVKFEELKNVKLEEEDEEEEQAAAALDLSVNPASVGGRLV

SEQ ID NO: 21788 - protein, 70 aa, Synthetic construct
AGQKVISKHKNGRFYQCEVVRLTTETFYEVNFDDGIVSQDCLQFGPPAEGEVVQVRWTDGQVYGAKFVAS

SEQ ID NO: 21789 - protein, 70 aa, Synthetic construct
AGQKVISKHKNGRFYQCEVVRLTTETFYEVNFDDGSFSDNLYPEDPPAEGEVVQVRWTDGQVYGAKFVAS

SEQ ID NO: 21790 - protein, 70 aa, Synthetic construct
AGQKVISKHKNGRFYQCEVVRLTTETFYEVNFDDGSFSDNLYPEDIVSQDEVVQVRWTDGQVYGAKFVAS

SEQ ID NO: 21791 - protein, 70 aa, Synthetic construct
AGQKVISKHKNGRFYQCEVVRLTTETFYEVNFDDGSFSDNLYPEDIVSQDCLQFGPPAEGEVVQVRWTDG

SEQ ID NO: 21792 - protein, 70 aa, Synthetic construct
MIFYQKSAKLFHCHKCFFTSKMYSNVYYHITSKHASPDKWNDKPKNQLNKETDPVKSPPLPEHQKIPCNS

SEQ ID NO: 21793 - protein, 70 aa, Synthetic construct
DEMDAGGLGKMIFYQKSAKLFHCHKCFFTSKMYSNVYYHINDKPKNQLNKETDPVKSPPLPEHQKIPCNS

SEQ ID NO: 21794 - protein, 70 aa, Synthetic construct
DEMDAGGLGKMIFYQKSAKLFHCHKCFFTSKMYSNVYYHITSKHANQLNKETDPVKSPPLPEHQKIPCNS

SEQ ID NO: 21795 - protein, 70 aa, Synthetic construct
DEMDAGGLGKMIFYQKSAKLFHCHKCFFTSKMYSNVYYHITSKHASPDKWETDPVKSPPLPEHQKIPCNS

SEQ ID NO: 21796 - protein, 70 aa, Synthetic construct
DEMDAGGLGKMIFYQKSAKLFHCHKCFFTSKMYSNVYYHITSKHASPDKWNDKPKKSPPLPEHQKIPCNS

SEQ ID NO: 21797 - protein, 70 aa, Synthetic construct
DEMDAGGLGKMIFYQKSAKLFHCHKCFFTSKMYSNVYYHITSKHASPDKWNDKPKNQLNKPEHQKIPCNS

SEQ ID NO: 21798 - protein, 70 aa, Synthetic construct
DEMDAGGLGKMIFYQKSAKLFHCHKCFFTSKMYSNVYYHITSKHASPDKWNDKPKNQLNKETDPVIPCNS

SEQ ID NO: 21799 - protein, 70 aa, Synthetic construct
DEMDAGGLGKMIFYQKSAKLFHCHKCFFTSKMYSNVYYHITSKHASPDKWNDKPKNQLNKETDPVKSPPL

SEQ ID NO: 21800 - protein, 70 aa, Synthetic construct
SNIQWSRSIKQEMEEKENCHLEQRQVKVEEPSRPSASWQNSVSERPPYSYMAMIQFAINSTERKRMTLKD

SEQ ID NO: 21801 - protein, 70 aa, Synthetic construct
SNIQWLRKMSQEMEEKENCHLEQRQVKVEEPSRPSASWQNSVSERPPYSYMAMIQFAINSTERKRMTLKD

SEQ ID NO: 21802 - protein, 70 aa, Synthetic construct
SNIQWLRKMSSDGLGKENCHLEQRQVKVEEPSRPSASWQNSVSERPPYSYMAMIQFAINSTERKRMTLKD

SEQ ID NO: 21803 - protein, 70 aa, Synthetic construct
SNIQWLRKMSSDGLGSRSIKLEQRQVKVEEPSRPSASWQNSVSERPPYSYMAMIQFAINSTERKRMTLKD

SEQ ID NO: 21804 - protein, 70 aa, Synthetic construct
SNIQWLRKMSSDGLGSRSIKQEMEEVKVEEPSRPSASWQNSVSERPPYSYMAMIQFAINSTERKRMTLKD

SEQ ID NO: 21805 - protein, 70 aa, Synthetic construct
SNIQWLRKMSSDGLGSRSIKQEMEEKENCHPSRPSASWQNSVSERPPYSYMAMIQFAINSTERKRMTLKD

SEQ ID NO: 21806 - protein, 70 aa, Synthetic construct
SNIQWLRKMSSDGLGSRSIKQEMEEKENCHLEQRQASWQNSVSERPPYSYMAMIQFAINSTERKRMTLKD

SEQ ID NO: 21807 - protein, 70 aa, Synthetic construct
SNIQWLRKMSSDGLGSRSIKQEMEEKENCHLEQRQVKVEESVSERPPYSYMAMIQFAINSTERKRMTLKD

SEQ ID NO: 21808 - protein, 70 aa, Synthetic construct
SNIQWLRKMSSDGLGSRSIKQEMEEKENCHLEQRQVKVEEPSRPSPPYSYMAMIQFAINSTERKRMTLKD

SEQ ID NO: 21809 - protein, 70 aa, Synthetic construct
SNIQWLRKMSSDGLGSRSIKQEMEEKENCHLEQRQVKVEEPSRPSASWQNMAMIQFAINSTERKRMTLKD

SEQ ID NO: 21810 - protein, 70 aa, Synthetic construct
SNIQWLRKMSSDGLGSRSIKQEMEEKENCHLEQRQVKVEEPSRPSASWQNSVSERFAINSTERKRMTLKD

SEQ ID NO: 21811 - protein, 70 aa, Synthetic construct
SNIQWLRKMSSDGLGSRSIKQEMEEKENCHLEQRQVKVEEPSRPSASWQNSVSERPPYSYTERKRMTLKD

SEQ ID NO: 21812 - protein, 70 aa, Synthetic construct
SNIQWLRKMSSDGLGSRSIKQEMEEKENCHLEQRQVKVEEPSRPSASWQNSVSERPPYSYMAMIQMTLKD

SEQ ID NO: 21813 - protein, 70 aa, Synthetic construct
SNIQWLRKMSSDGLGSRSIKQEMEEKENCHLEQRQVKVEEPSRPSASWQNSVSERPPYSYMAMIQFAINS

SEQ ID NO: 21814 - protein, 70 aa, Synthetic construct
SSAGPGKEEKLLFGEGFSPLLPVQTIKEEEIQPGEEMPHLARPIKVESPPLEEWPSPAPSFKEESSHSWE

SEQ ID NO: 21815 - protein, 70 aa, Synthetic construct
LLAEEGKEEKLLFGEGFSPLLPVQTIKEEEIQPGEEMPHLARPIKVESPPLEEWPSPAPSFKEESSHSWE

SEQ ID NO: 21816 - protein, 70 aa, Synthetic construct
LLAEEGIAPLLLFGEGFSPLLPVQTIKEEEIQPGEEMPHLARPIKVESPPLEEWPSPAPSFKEESSHSWE

SEQ ID NO: 21817 - protein, 70 aa, Synthetic construct
LLAEEGIAPLSSAGPGFSPLLPVQTIKEEEIQPGEEMPHLARPIKVESPPLEEWPSPAPSFKEESSHSWE

SEQ ID NO: 21818 - protein, 70 aa, Synthetic construct
LLAEEGIAPLSSAGPGKEEKLPVQTIKEEEIQPGEEMPHLARPIKVESPPLEEWPSPAPSFKEESSHSWE

SEQ ID NO: 21819 - protein, 70 aa, Synthetic construct
LLAEEGIAPLSSAGPGKEEKLLFGEIKEEEIQPGEEMPHLARPIKVESPPLEEWPSPAPSFKEESSHSWE

SEQ ID NO: 21820 - protein, 70 aa, Synthetic construct
LLAEEGIAPLSSAGPGKEEKLLFGEGFSPLIQPGEEMPHLARPIKVESPPLEEWPSPAPSFKEESSHSWE

SEQ ID NO: 21821 - protein, 70 aa, Synthetic construct
LLAEEGIAPLSSAGPGKEEKLLFGEGFSPLLPVQTEMPHLARPIKVESPPLEEWPSPAPSFKEESSHSWE

SEQ ID NO: 21822 - protein, 70 aa, Synthetic construct
LLAEEGIAPLSSAGPGKEEKLLFGEGFSPLLPVQTIKEEEARPIKVESPPLEEWPSPAPSFKEESSHSWE

SEQ ID NO: 21823 - protein, 70 aa, Synthetic construct
LLAEEGIAPLSSAGPGKEEKLLFGEGFSPLLPVQTIKEEEIQPGEVESPPLEEWPSPAPSFKEESSHSWE

SEQ ID NO: 21824 - protein, 70 aa, Synthetic construct
LLAEEGIAPLSSAGPGKEEKLLFGEGFSPLLPVQTIKEEEIQPGEEMPHLLEEWPSPAPSFKEESSHSWE

SEQ ID NO: 21825 - protein, 70 aa, Synthetic construct
LLAEEGIAPLSSAGPGKEEKLLFGEGFSPLLPVQTIKEEEIQPGEEMPHLARPIKSPAPSFKEESSHSWE

SEQ ID NO: 21826 - protein, 70 aa, Synthetic construct
LLAEEGIAPLSSAGPGKEEKLLFGEGFSPLLPVQTIKEEEIQPGEEMPHLARPIKVESPPFKEESSHSWE

SEQ ID NO: 21827 - protein, 70 aa, Synthetic construct
LLAEEGIAPLSSAGPGKEEKLLFGEGFSPLLPVQTIKEEEIQPGEEMPHLARPIKVESPPLEEWPSHSWE

SEQ ID NO: 21828 - protein, 70 aa, Synthetic construct
LLAEEGIAPLSSAGPGKEEKLLFGEGFSPLLPVQTIKEEEIQPGEEMPHLARPIKVESPPLEEWPSPAPS

SEQ ID NO: 21829 - protein, 70 aa, Synthetic construct
TFTNSQTSTEDPGDSTPFEDSEEFCFSAEANSFDGDDEFDTYNEDDEEDESETGYWITCCPTCDVDINTW

SEQ ID NO: 21830 - protein, 70 aa, Synthetic construct
AEDDTQTSTEDPGDSTPFEDSEEFCFSAEANSFDGDDEFDTYNEDDEEDESETGYWITCCPTCDVDINTW

SEQ ID NO: 21831 - protein, 70 aa, Synthetic construct
AEDDTNEEQTDPGDSTPFEDSEEFCFSAEANSFDGDDEFDTYNEDDEEDESETGYWITCCPTCDVDINTW

SEQ ID NO: 21832 - protein, 70 aa, Synthetic construct
AEDDTNEEQTTFTNSTPFEDSEEFCFSAEANSFDGDDEFDTYNEDDEEDESETGYWITCCPTCDVDINTW

SEQ ID NO: 21833 - protein, 70 aa, Synthetic construct
AEDDTNEEQTTFTNSQTSTESEEFCFSAEANSFDGDDEFDTYNEDDEEDESETGYWITCCPTCDVDINTW

SEQ ID NO: 21834 - protein, 70 aa, Synthetic construct
AEDDTNEEQTTFTNSQTSTEDPGDSFSAEANSFDGDDEFDTYNEDDEEDESETGYWITCCPTCDVDINTW

SEQ ID NO: 21835 - protein, 70 aa, Synthetic construct
AEDDTNEEQTTFTNSQTSTEDPGDSTPFEDNSFDGDDEFDTYNEDDEEDESETGYWITCCPTCDVDINTW

SEQ ID NO: 21836 - protein, 70 aa, Synthetic construct
AEDDTNEEQTTFTNSQTSTEDPGDSTPFEDSEEFCDDEFDTYNEDDEEDESETGYWITCCPTCDVDINTW

SEQ ID NO: 21837 - protein, 70 aa, Synthetic construct
AEDDTNEEQTTFTNSQTSTEDPGDSTPFEDSEEFCFSAEATYNEDDEEDESETGYWITCCPTCDVDINTW

SEQ ID NO: 21838 - protein, 70 aa, Synthetic construct
AEDDTNEEQTTFTNSQTSTEDPGDSTPFEDSEEFCFSAEANSFDGDEEDESETGYWITCCPTCDVDINTW

SEQ ID NO: 21839 - protein, 70 aa, Synthetic construct
AEDDTNEEQTTFTNSQTSTEDPGDSTPFEDSEEFCFSAEANSFDGDDEFDSETGYWITCCPTCDVDINTW

SEQ ID NO: 21840 - protein, 70 aa, Synthetic construct
NSFDGDDEFDTYNEDDEEDESETGYWITCCPTCDVDINTWVPFYSTELNKPAMIYCSHGDGHWVHAQCMD

SEQ ID NO: 21841 - protein, 70 aa, Synthetic construct
SEEFCDDEFDTYNEDDEEDESETGYWITCCPTCDVDINTWVPFYSTELNKPAMIYCSHGDGHWVHAQCMD

SEQ ID NO: 21842 - protein, 70 aa, Synthetic construct
SEEFCFSAEATYNEDDEEDESETGYWITCCPTCDVDINTWVPFYSTELNKPAMIYCSHGDGHWVHAQCMD

SEQ ID NO: 21843 - protein, 70 aa, Synthetic construct
SEEFCFSAEANSFDGDEEDESETGYWITCCPTCDVDINTWVPFYSTELNKPAMIYCSHGDGHWVHAQCMD

SEQ ID NO: 21844 - protein, 70 aa, Synthetic construct
SEEFCFSAEANSFDGDDEFDSETGYWITCCPTCDVDINTWVPFYSTELNKPAMIYCSHGDGHWVHAQCMD

SEQ ID NO: 21845 - protein, 70 aa, Synthetic construct
SEEFCFSAEANSFDGDDEFDTYNEDWITCCPTCDVDINTWVPFYSTELNKPAMIYCSHGDGHWVHAQCMD

SEQ ID NO: 21846 - protein, 70 aa, Synthetic construct
SEEFCFSAEANSFDGDDEFDTYNEDDEEDESETGYWITCCPTCDVTELNKPAMIYCSHGDGHWVHAQCMD

SEQ ID NO: 21847 - protein, 70 aa, Synthetic construct
SEEFCFSAEANSFDGDDEFDTYNEDDEEDESETGYWITCCPTCDVDINTWPAMIYCSHGDGHWVHAQCMD

SEQ ID NO: 21848 - protein, 70 aa, Synthetic construct
SEEFCFSAEANSFDGDDEFDTYNEDDEEDESETGYWITCCPTCDVDINTWVPFYSCSHGDGHWVHAQCMD

SEQ ID NO: 21849 - protein, 70 aa, Synthetic construct
SEEFCFSAEANSFDGDDEFDTYNEDDEEDESETGYWITCCPTCDVDINTWVPFYSTELNKGHWVHAQCMD

SEQ ID NO: 21850 - protein, 70 aa, Synthetic construct
SEEFCFSAEANSFDGDDEFDTYNEDDEEDESETGYWITCCPTCDVDINTWVPFYSTELNKPAMIYAQCMD

SEQ ID NO: 21851 - protein, 70 aa, Synthetic construct
SEEFCFSAEANSFDGDDEFDTYNEDDEEDESETGYWITCCPTCDVDINTWVPFYSTELNKPAMIYCSHGD

SEQ ID NO: 21852 - protein, 70 aa, Synthetic construct
RRPLGPPSCMQLGVMPPPRQAPLPPAEPLGNVPFLLYPGPAEPPYYDAYAGVFPYVPFPGAFGVYEYPFE

SEQ ID NO: 21853 - protein, 70 aa, Synthetic construct
NNNFCPPSCMQLGVMPPPRQAPLPPAEPLGNVPFLLYPGPAEPPYYDAYAGVFPYVPFPGAFGVYEYPFE

SEQ ID NO: 21854 - protein, 70 aa, Synthetic construct
NNNFCRALVDQLGVMPPPRQAPLPPAEPLGNVPFLLYPGPAEPPYYDAYAGVFPYVPFPGAFGVYEYPFE

SEQ ID NO: 21855 - protein, 70 aa, Synthetic construct
NNNFCRALVDRRPLGPPPRQAPLPPAEPLGNVPFLLYPGPAEPPYYDAYAGVFPYVPFPGAFGVYEYPFE

SEQ ID NO: 21856 - protein, 70 aa, Synthetic construct
NNNFCRALVDRRPLGPPSCMAPLPPAEPLGNVPFLLYPGPAEPPYYDAYAGVFPYVPFPGAFGVYEYPFE

SEQ ID NO: 21857 - protein, 70 aa, Synthetic construct
NNNFCRALVDRRPLGPPSCMQLGVMAEPLGNVPFLLYPGPAEPPYYDAYAGVFPYVPFPGAFGVYEYPFE

SEQ ID NO: 21858 - protein, 70 aa, Synthetic construct
NNNFCRALVDRRPLGPPSCMQLGVMPPPRQNVPFLLYPGPAEPPYYDAYAGVFPYVPFPGAFGVYEYPFE

SEQ ID NO: 21859 - protein, 70 aa, Synthetic construct
NNNFCRALVDRRPLGPPSCMQLGVMPPPRQAPLPPLYPGPAEPPYYDAYAGVFPYVPFPGAFGVYEYPFE

SEQ ID NO: 21860 - protein, 70 aa, Synthetic construct
NNNFCRALVDRRPLGPPSCMQLGVMPPPRQAPLPPAEPLGAEPPYYDAYAGVFPYVPFPGAFGVYEYPFE

SEQ ID NO: 21861 - protein, 70 aa, Synthetic construct
NNNFCRALVDRRPLGPPSCMQLGVMPPPRQAPLPPAEPLGNVPFLYDAYAGVFPYVPFPGAFGVYEYPFE

SEQ ID NO: 21862 - protein, 70 aa, Synthetic construct
NNNFCRALVDRRPLGPPSCMQLGVMPPPRQAPLPPAEPLGNVPFLLYPGPGVFPYVPFPGAFGVYEYPFE

SEQ ID NO: 21863 - protein, 70 aa, Synthetic construct
NNNFCRALVDRRPLGPPSCMQLGVMPPPRQAPLPPAEPLGNVPFLLYPGPAEPPYYDAYAAFGVYEYPFE

SEQ ID NO: 21864 - protein, 70 aa, Synthetic construct
NNNFCRALVDRRPLGPPSCMQLGVMPPPRQAPLPPAEPLGNVPFLLYPGPAEPPYYDAYAGVFPYEYPFE

SEQ ID NO: 21865 - protein, 70 aa, Synthetic construct
GYARLRGHLPGALAEKRLSKVETLRAAIRYIKYLQELLSSAPDGSTGPCPAPPATPRPDRPGDGEARAPS

SEQ ID NO: 21866 - protein, 70 aa, Synthetic construct
GYARLRGHLPGALAEKRLSKVETLRAAIRYIKYLQELLSSAPDGSTPPASAPPATPRPDRPGDGEARAPS

SEQ ID NO: 21867 - protein, 70 aa, Synthetic construct
GYARLRGHLPGALAEKRLSKVETLRAAIRYIKYLQELLSSAPDGSTPPASRGLPGPRPDRPGDGEARAPS

SEQ ID NO: 21868 - protein, 70 aa, Synthetic construct
GYARLRGHLPGALAEKRLSKVETLRAAIRYIKYLQELLSSAPDGSTPPASRGLPGTGPCPPGDGEARAPS

SEQ ID NO: 21869 - protein, 70 aa, Synthetic construct
GYARLRGHLPGALAEKRLSKVETLRAAIRYIKYLQELLSSAPDGSTPPASRGLPGTGPCPAPPATARAPS

SEQ ID NO: 21870 - protein, 70 aa, Synthetic construct
GYARLRGHLPGALAEKRLSKVETLRAAIRYIKYLQELLSSAPDGSTPPASRGLPGTGPCPAPPATPRPDR

SEQ ID NO: 21871 - protein, 70 aa, Synthetic construct
DKIKEEPDNATQESKLKIGGVSSVNERPIAQQLNPGFQLSFASSGPSVLLPSVPAVAIKVFCSGCKKMLY

SEQ ID NO: 21872 - protein, 70 aa, Synthetic construct
DKIKEEPDNAQEYGCLKIGGVSSVNERPIAQQLNPGFQLSFASSGPSVLLPSVPAVAIKVFCSGCKKMLY

SEQ ID NO: 21873 - protein, 70 aa, Synthetic construct
DKIKEEPDNAQEYGCVQQPKVSSVNERPIAQQLNPGFQLSFASSGPSVLLPSVPAVAIKVFCSGCKKMLY

SEQ ID NO: 21874 - protein, 70 aa, Synthetic construct
DKIKEEPDNAQEYGCVQQPKTQESKERPIAQQLNPGFQLSFASSGPSVLLPSVPAVAIKVFCSGCKKMLY

SEQ ID NO: 21875 - protein, 70 aa, Synthetic construct
DKIKEEPDNAQEYGCVQQPKTQESKLKIGGQQLNPGFQLSFASSGPSVLLPSVPAVAIKVFCSGCKKMLY

SEQ ID NO: 21876 - protein, 70 aa, Synthetic construct
DKIKEEPDNAQEYGCVQQPKTQESKLKIGGVSSVNGFQLSFASSGPSVLLPSVPAVAIKVFCSGCKKMLY

SEQ ID NO: 21877 - protein, 70 aa, Synthetic construct
DKIKEEPDNAQEYGCVQQPKTQESKLKIGGVSSVNERPIAFASSGPSVLLPSVPAVAIKVFCSGCKKMLY

SEQ ID NO: 21878 - protein, 70 aa, Synthetic construct
DKIKEEPDNAQEYGCVQQPKTQESKLKIGGVSSVNERPIAQQLNPPSVLLPSVPAVAIKVFCSGCKKMLY

SEQ ID NO: 21879 - protein, 70 aa, Synthetic construct
DKIKEEPDNAQEYGCVQQPKTQESKLKIGGVSSVNERPIAQQLNPGFQLSPSVPAVAIKVFCSGCKKMLY

SEQ ID NO: 21880 - protein, 70 aa, Synthetic construct
DKIKEEPDNAQEYGCVQQPKTQESKLKIGGVSSVNERPIAQQLNPGFQLSFASSGVAIKVFCSGCKKMLY

SEQ ID NO: 21881 - protein, 70 aa, Synthetic construct
DKIKEEPDNAQEYGCVQQPKTQESKLKIGGVSSVNERPIAQQLNPGFQLSFASSGPSVLLFCSGCKKMLY

SEQ ID NO: 21882 - protein, 70 aa, Synthetic construct
DKIKEEPDNAQEYGCVQQPKTQESKLKIGGVSSVNERPIAQQLNPGFQLSFASSGPSVLLPSVPAKKMLY

SEQ ID NO: 21883 - protein, 70 aa, Synthetic construct
DKIKEEPDNAQEYGCVQQPKTQESKLKIGGVSSVNERPIAQQLNPGFQLSFASSGPSVLLPSVPAVAIKV

SEQ ID NO: 21884 - protein, 70 aa, Synthetic construct
PQNKVNISKAKTAVTELPSARTDTTPVITSVMSLAKIPATLSTGNTNSVLKGAVTKEAAKIIQDESTQED

SEQ ID NO: 21885 - protein, 70 aa, Synthetic construct
CHQQINISKAKTAVTELPSARTDTTPVITSVMSLAKIPATLSTGNTNSVLKGAVTKEAAKIIQDESTQED

SEQ ID NO: 21886 - protein, 70 aa, Synthetic construct
CHQQIMNDCLKTAVTELPSARTDTTPVITSVMSLAKIPATLSTGNTNSVLKGAVTKEAAKIIQDESTQED

SEQ ID NO: 21887 - protein, 70 aa, Synthetic construct
CHQQIMNDCLPQNKVELPSARTDTTPVITSVMSLAKIPATLSTGNTNSVLKGAVTKEAAKIIQDESTQED

SEQ ID NO: 21888 - protein, 70 aa, Synthetic construct
CHQQIMNDCLPQNKVNISKARTDTTPVITSVMSLAKIPATLSTGNTNSVLKGAVTKEAAKIIQDESTQED

SEQ ID NO: 21889 - protein, 70 aa, Synthetic construct
CHQQIMNDCLPQNKVNISKAKTAVTPVITSVMSLAKIPATLSTGNTNSVLKGAVTKEAAKIIQDESTQED

SEQ ID NO: 21890 - protein, 70 aa, Synthetic construct
CHQQIMNDCLPQNKVNISKAKTAVTELPSARTDTTPVITSVMSLATNSVLKGAVTKEAAKIIQDESTQED

SEQ ID NO: 21891 - protein, 70 aa, Synthetic construct
CHQQIMNDCLPQNKVNISKAKTAVTELPSARTDTTPVITSVMSLAKIPATKGAVTKEAAKIIQDESTQED

SEQ ID NO: 21892 - protein, 70 aa, Synthetic construct
CHQQIMNDCLPQNKVNISKAKTAVTELPSARTDTTPVITSVMSLAKIPATLSTGNKEAAKIIQDESTQED

SEQ ID NO: 21893 - protein, 70 aa, Synthetic construct
CHQQIMNDCLPQNKVNISKAKTAVTELPSARTDTTPVITSVMSLAKIPATLSTGNTNSVLIIQDESTQED

SEQ ID NO: 21894 - protein, 70 aa, Synthetic construct
CHQQIMNDCLPQNKVNISKAKTAVTELPSARTDTTPVITSVMSLAKIPATLSTGNTNSVLKGAVTSTQED

SEQ ID NO: 21895 - protein, 70 aa, Synthetic construct
CHQQIMNDCLPQNKVNISKAKTAVTELPSARTDTTPVITSVMSLAKIPATLSTGNTNSVLKGAVTKEAAK

SEQ ID NO: 21896 - protein, 70 aa, Synthetic construct
RTDTTPVITSVMSLATNSVLKGAVTKEAAKIIQDESTQEDAMKFPSSQSSQPSRLLKNKGISCKPVTQTK

SEQ ID NO: 21897 - protein, 70 aa, Synthetic construct
RTDTTPVITSVMSLAKIPATKGAVTKEAAKIIQDESTQEDAMKFPSSQSSQPSRLLKNKGISCKPVTQTK

SEQ ID NO: 21898 - protein, 70 aa, Synthetic construct
RTDTTPVITSVMSLAKIPATLSTGNKEAAKIIQDESTQEDAMKFPSSQSSQPSRLLKNKGISCKPVTQTK

SEQ ID NO: 21899 - protein, 70 aa, Synthetic construct
RTDTTPVITSVMSLAKIPATLSTGNTNSVLIIQDESTQEDAMKFPSSQSSQPSRLLKNKGISCKPVTQTK

SEQ ID NO: 21900 - protein, 70 aa, Synthetic construct
RTDTTPVITSVMSLAKIPATLSTGNTNSVLKGAVTSTQEDAMKFPSSQSSQPSRLLKNKGISCKPVTQTK

SEQ ID NO: 21901 - protein, 70 aa, Synthetic construct
RTDTTPVITSVMSLAKIPATLSTGNTNSVLKGAVTKEAAKAMKFPSSQSSQPSRLLKNKGISCKPVTQTK

SEQ ID NO: 21902 - protein, 70 aa, Synthetic construct
RTDTTPVITSVMSLAKIPATLSTGNTNSVLKGAVTKEAAKIIQDESSQSSQPSRLLKNKGISCKPVTQTK

SEQ ID NO: 21903 - protein, 70 aa, Synthetic construct
RTDTTPVITSVMSLAKIPATLSTGNTNSVLKGAVTKEAAKIIQDESTQEDQPSRLLKNKGISCKPVTQTK

SEQ ID NO: 21904 - protein, 70 aa, Synthetic construct
RTDTTPVITSVMSLAKIPATLSTGNTNSVLKGAVTKEAAKIIQDESTQEDAMKFPLKNKGISCKPVTQTK

SEQ ID NO: 21905 - protein, 70 aa, Synthetic construct
RTDTTPVITSVMSLAKIPATLSTGNTNSVLKGAVTKEAAKIIQDESTQEDAMKFPSSQSSISCKPVTQTK

SEQ ID NO: 21906 - protein, 70 aa, Synthetic construct
RTDTTPVITSVMSLAKIPATLSTGNTNSVLKGAVTKEAAKIIQDESTQEDAMKFPSSQSSQPSRLVTQTK

SEQ ID NO: 21907 - protein, 70 aa, Synthetic construct
RTDTTPVITSVMSLAKIPATLSTGNTNSVLKGAVTKEAAKIIQDESTQEDAMKFPSSQSSQPSRLLKNKG

SEQ ID NO: 21908 - protein, 70 aa, Synthetic construct
VRPAAASPIVSGARRRRVRCRKCKACVQGECGVCHYCRDMKKFGGPGRMKQSCVLRQCLAPRLPHSVTCS

SEQ ID NO: 21909 - protein, 70 aa, Synthetic construct
TMKPAASPIVSGARRRRVRCRKCKACVQGECGVCHYCRDMKKFGGPGRMKQSCVLRQCLAPRLPHSVTCS

SEQ ID NO: 21910 - protein, 70 aa, Synthetic construct
TMKPAPRLTPSGARRRRVRCRKCKACVQGECGVCHYCRDMKKFGGPGRMKQSCVLRQCLAPRLPHSVTCS

SEQ ID NO: 21911 - protein, 70 aa, Synthetic construct
TMKPAPRLTPVRPAARRVRCRKCKACVQGECGVCHYCRDMKKFGGPGRMKQSCVLRQCLAPRLPHSVTCS

SEQ ID NO: 21912 - protein, 70 aa, Synthetic construct
EKMVYMTVNDSQQEDEDLNVAEIADEVYMEVIVGEEDAAVAAAAAAVHEQQIDEDEMKTFVPIAWAAAYG

SEQ ID NO: 21913 - protein, 70 aa, Synthetic construct
DQNSSMTVNDSQQEDEDLNVAEIADEVYMEVIVGEEDAAVAAAAAAVHEQQIDEDEMKTFVPIAWAAAYG

SEQ ID NO: 21914 - protein, 70 aa, Synthetic construct
DQNSSIRVPRSQQEDEDLNVAEIADEVYMEVIVGEEDAAVAAAAAAVHEQQIDEDEMKTFVPIAWAAAYG

SEQ ID NO: 21915 - protein, 70 aa, Synthetic construct
DQNSSIRVPREKMVYEDLNVAEIADEVYMEVIVGEEDAAVAAAAAAVHEQQIDEDEMKTFVPIAWAAAYG

SEQ ID NO: 21916 - protein, 70 aa, Synthetic construct
DQNSSIRVPREKMVYMTVNDAEIADEVYMEVIVGEEDAAVAAAAAAVHEQQIDEDEMKTFVPIAWAAAYG

SEQ ID NO: 21917 - protein, 70 aa, Synthetic construct
DQNSSIRVPREKMVYMTVNDSQQEDEVYMEVIVGEEDAAVAAAAAAVHEQQIDEDEMKTFVPIAWAAAYG

SEQ ID NO: 21918 - protein, 70 aa, Synthetic construct
DQNSSIRVPREKMVYMTVNDSQQEDEDLNVAEIADEVYMEVIVGEAVHEQQIDEDEMKTFVPIAWAAAYG

SEQ ID NO: 21919 - protein, 70 aa, Synthetic construct
DQNSSIRVPREKMVYMTVNDSQQEDEDLNVAEIADEVYMEVIVGEEDAAVQIDEDEMKTFVPIAWAAAYG

SEQ ID NO: 21920 - protein, 70 aa, Synthetic construct
DQNSSIRVPREKMVYMTVNDSQQEDEDLNVAEIADEVYMEVIVGEEDAAVAAAAAEMKTFVPIAWAAAYG

SEQ ID NO: 21921 - protein, 70 aa, Synthetic construct
DQNSSIRVPREKMVYMTVNDSQQEDEDLNVAEIADEVYMEVIVGEEDAAVAAAAAAVHEQVPIAWAAAYG

SEQ ID NO: 21922 - protein, 70 aa, Synthetic construct
DQNSSIRVPREKMVYMTVNDSQQEDEDLNVAEIADEVYMEVIVGEEDAAVAAAAAAVHEQQIDEDAAAYG

SEQ ID NO: 21923 - protein, 70 aa, Synthetic construct
DQNSSIRVPREKMVYMTVNDSQQEDEDLNVAEIADEVYMEVIVGEEDAAVAAAAAAVHEQQIDEDEMKTF

SEQ ID NO: 21924 - protein, 70 aa, Synthetic construct
MHLPRSSFSKVPGTVSSLVDARFQLPAFPWFPHVIQPKPEITAGGSVPALKTKPRFDFANLALAATQEDP

SEQ ID NO: 21925 - protein, 70 aa, Synthetic construct
LHQWTSSFSKVPGTVSSLVDARFQLPAFPWFPHVIQPKPEITAGGSVPALKTKPRFDFANLALAATQEDP

SEQ ID NO: 21926 - protein, 70 aa, Synthetic construct
LHQWTLGYPAVPGTVSSLVDARFQLPAFPWFPHVIQPKPEITAGGSVPALKTKPRFDFANLALAATQEDP

SEQ ID NO: 21927 - protein, 70 aa, Synthetic construct
LHQWTLGYPAMHLPRSSLVDARFQLPAFPWFPHVIQPKPEITAGGSVPALKTKPRFDFANLALAATQEDP

SEQ ID NO: 21928 - protein, 70 aa, Synthetic construct
LHQWTLGYPAMHLPRSSFSKARFQLPAFPWFPHVIQPKPEITAGGSVPALKTKPRFDFANLALAATQEDP

SEQ ID NO: 21929 - protein, 70 aa, Synthetic construct
LHQWTLGYPAMHLPRSSFSKVPGTVPAFPWFPHVIQPKPEITAGGSVPALKTKPRFDFANLALAATQEDP

SEQ ID NO: 21930 - protein, 70 aa, Synthetic construct
LHQWTLGYPAMHLPRSSFSKVPGTVSSLVDFPHVIQPKPEITAGGSVPALKTKPRFDFANLALAATQEDP

SEQ ID NO: 21931 - protein, 70 aa, Synthetic construct
LHQWTLGYPAMHLPRSSFSKVPGTVSSLVDARFQLQPKPEITAGGSVPALKTKPRFDFANLALAATQEDP

SEQ ID NO: 21932 - protein, 70 aa, Synthetic construct
LHQWTLGYPAMHLPRSSFSKVPGTVSSLVDARFQLPAFPWITAGGSVPALKTKPRFDFANLALAATQEDP

SEQ ID NO: 21933 - protein, 70 aa, Synthetic construct
LHQWTLGYPAMHLPRSSFSKVPGTVSSLVDARFQLPAFPWFPHVISVPALKTKPRFDFANLALAATQEDP

SEQ ID NO: 21934 - protein, 70 aa, Synthetic construct
LHQWTLGYPAMHLPRSSFSKVPGTVSSLVDARFQLPAFPWFPHVIQPKPEKTKPRFDFANLALAATQEDP

SEQ ID NO: 21935 - protein, 70 aa, Synthetic construct
DCRYKFHNSRWMVAGKADPEMPKRMYIHPDSPATGEQWMAKPVAFHKLKLTNNISMHKYQPRFHIVRAND

SEQ ID NO: 21936 - protein, 70 aa, Synthetic construct
SSCCCPCCLQEIEIQAPPGVPIGYVIQTWHPCLPKFTIQNEKREDVLKISGPCVVCSCCGDVDFEIKSLD

SEQ ID NO: 21937 - protein, 70 aa, Synthetic construct
VITLERPLRCSSCCCAPPGVPIGYVIQTWHPCLPKFTIQNEKREDVLKISGPCVVCSCCGDVDFEIKSLD

SEQ ID NO: 21938 - protein, 70 aa, Synthetic construct
VITLERPLRCSSCCCPCCLQPIGYVIQTWHPCLPKFTIQNEKREDVLKISGPCVVCSCCGDVDFEIKSLD

SEQ ID NO: 21939 - protein, 70 aa, Synthetic construct
VITLERPLRCSSCCCPCCLQEIEIQIQTWHPCLPKFTIQNEKREDVLKISGPCVVCSCCGDVDFEIKSLD

SEQ ID NO: 21940 - protein, 70 aa, Synthetic construct
VITLERPLRCSSCCCPCCLQEIEIQAPPGVPIGYVFTIQNEKREDVLKISGPCVVCSCCGDVDFEIKSLD

SEQ ID NO: 21941 - protein, 70 aa, Synthetic construct
VITLERPLRCSSCCCPCCLQEIEIQAPPGVPIGYVIQTWHEKREDVLKISGPCVVCSCCGDVDFEIKSLD

SEQ ID NO: 21942 - protein, 70 aa, Synthetic construct
VITLERPLRCSSCCCPCCLQEIEIQAPPGVPIGYVIQTWHPCLPKVLKISGPCVVCSCCGDVDFEIKSLD

SEQ ID NO: 21943 - protein, 70 aa, Synthetic construct
VITLERPLRCSSCCCPCCLQEIEIQAPPGVPIGYVIQTWHPCLPKFTIQNGPCVVCSCCGDVDFEIKSLD

SEQ ID NO: 21944 - protein, 70 aa, Synthetic construct
VITLERPLRCSSCCCPCCLQEIEIQAPPGVPIGYVIQTWHPCLPKFTIQNEKREDCSCCGDVDFEIKSLD

SEQ ID NO: 21945 - protein, 70 aa, Synthetic construct
VITLERPLRCSSCCCPCCLQEIEIQAPPGVPIGYVIQTWHPCLPKFTIQNEKREDVLKISDVDFEIKSLD

SEQ ID NO: 21946 - protein, 70 aa, Synthetic construct
VITLERPLRCSSCCCPCCLQEIEIQAPPGVPIGYVIQTWHPCLPKFTIQNEKREDVLKISGPCVVIKSLD

SEQ ID NO: 21947 - protein, 70 aa, Synthetic construct
VITLERPLRCSSCCCPCCLQEIEIQAPPGVPIGYVIQTWHPCLPKFTIQNEKREDVLKISGPCVVCSCCG

SEQ ID NO: 21948 - protein, 70 aa, Synthetic construct
HSLKKVTFEDVAIDFSKRKLYRDVMLENISHLVSLGYQISKSYIILQLEQGKELWQEGREFLQDQNPDRE

SEQ ID NO: 21949 - protein, 70 aa, Synthetic construct
HSLKKVTFEDVAIDFTQEEWAMMDTSKRKLYRDVMLENISKSYIILQLEQGKELWQEGREFLQDQNPDRE

SEQ ID NO: 21950 - protein, 70 aa, Synthetic construct
HSLKKVTFEDVAIDFTQEEWAMMDTSKRKLYRDVMLENISHLVSLLQLEQGKELWQEGREFLQDQNPDRE

SEQ ID NO: 21951 - protein, 70 aa, Synthetic construct
HSLKKVTFEDVAIDFTQEEWAMMDTSKRKLYRDVMLENISHLVSLGYQISGKELWQEGREFLQDQNPDRE

SEQ ID NO: 21952 - protein, 70 aa, Synthetic construct
HSLKKVTFEDVAIDFTQEEWAMMDTSKRKLYRDVMLENISHLVSLGYQISKSYIIQEGREFLQDQNPDRE

SEQ ID NO: 21953 - protein, 70 aa, Synthetic construct
HSLKKVTFEDVAIDFTQEEWAMMDTSKRKLYRDVMLENISHLVSLGYQISKSYIILQLEQFLQDQNPDRE

SEQ ID NO: 21954 - protein, 70 aa, Synthetic construct
HSLKKVTFEDVAIDFTQEEWAMMDTSKRKLYRDVMLENISHLVSLGYQISKSYIILQLEQGKELWNPDRE

SEQ ID NO: 21955 - protein, 70 aa, Synthetic construct
HSLKKVTFEDVAIDFTQEEWAMMDTSKRKLYRDVMLENISHLVSLGYQISKSYIILQLEQGKELWQEGRE

SEQ ID NO: 21956 - protein, 70 aa, Synthetic construct
IVEHTEPRVAESQELSNWRDDIVLRRAALGLRLLPNLTAQCPTQPVSSGHCYNPKGCGTDAVPGSAFQSS

SEQ ID NO: 21957 - protein, 70 aa, Synthetic construct
ELWKHEPRVAESQELSNWRDDIVLRRAALGLRLLPNLTAQCPTQPVSSGHCYNPKGCGTDAVPGSAFQSS

SEQ ID NO: 21958 - protein, 70 aa, Synthetic construct
ELWKHRQDLAESQELSNWRDDIVLRRAALGLRLLPNLTAQCPTQPVSSGHCYNPKGCGTDAVPGSAFQSS

SEQ ID NO: 21959 - protein, 70 aa, Synthetic construct
ELWKHRQDLAIVEHTSNWRDDIVLRRAALGLRLLPNLTAQCPTQPVSSGHCYNPKGCGTDAVPGSAFQSS

SEQ ID NO: 21960 - protein, 70 aa, Synthetic construct
ELWKHRQDLAIVEHTEPRVAESQELSNWRDDIVLRRAALGLRLLPVSSGHCYNPKGCGTDAVPGSAFQSS

SEQ ID NO: 21961 - protein, 70 aa, Synthetic construct
ELWKHRQDLAIVEHTEPRVAESQELSNWRDDIVLRRAALGLRLLPNLTAQCYNPKGCGTDAVPGSAFQSS

SEQ ID NO: 21962 - protein, 70 aa, Synthetic construct
ELWKHRQDLAIVEHTEPRVAESQELSNWRDDIVLRRAALGLRLLPNLTAQCPTQPGCGTDAVPGSAFQSS

SEQ ID NO: 21963 - protein, 70 aa, Synthetic construct
ELWKHRQDLAIVEHTEPRVAESQELSNWRDDIVLRRAALGLRLLPNLTAQCPTQPVSSGHAVPGSAFQSS

SEQ ID NO: 21964 - protein, 70 aa, Synthetic construct
ELWKHRQDLAIVEHTEPRVAESQELSNWRDDIVLRRAALGLRLLPNLTAQCPTQPVSSGHCYNPKAFQSS

SEQ ID NO: 21965 - protein, 70 aa, Synthetic construct
ELWKHRQDLAIVEHTEPRVAESQELSNWRDDIVLRRAALGLRLLPNLTAQCPTQPVSSGHCYNPKGCGTD

SEQ ID NO: 21966 - protein, 70 aa, Synthetic construct
LTNQNDELEEKVKEIPKLRTQLRDLDQRYNTILQMYGEKAEEAEELRLDLEDVKNMYKTQIDELLRQSLS

SEQ ID NO: 21967 - protein, 70 aa, Synthetic construct
RSIMADELEEKVKEIPKLRTQLRDLDQRYNTILQMYGEKAEEAEELRLDLEDVKNMYKTQIDELLRQSLS

SEQ ID NO: 21968 - protein, 70 aa, Synthetic construct
RSIMAEELVKKVKEIPKLRTQLRDLDQRYNTILQMYGEKAEEAEELRLDLEDVKNMYKTQIDELLRQSLS

SEQ ID NO: 21969 - protein, 70 aa, Synthetic construct
RSIMAEELVKLTNQNDELEEKVKEIPKLRTQLRDLDQRYNEEAEELRLDLEDVKNMYKTQIDELLRQSLS

SEQ ID NO: 21970 - protein, 70 aa, Synthetic construct
RSIMAEELVKLTNQNDELEEKVKEIPKLRTQLRDLDQRYNTILQMLRLDLEDVKNMYKTQIDELLRQSLS

SEQ ID NO: 21971 - protein, 70 aa, Synthetic construct
RSIMAEELVKLTNQNDELEEKVKEIPKLRTQLRDLDQRYNTILQMYGEKAEEAEELRLDLIDELLRQSLS

SEQ ID NO: 21972 - protein, 70 aa, Synthetic construct
VTPEKHRARKRQAWLWEEDKNLRSGVRKYGEGNWSKILLHYKFNNRTSVMLKDRWRTMKKLKLISSDSED

SEQ ID NO: 21973 - protein, 70 aa, Synthetic construct
SRIPVHRARKRQAWLWEEDKNLRSGVRKYGEGNWSKILLHYKFNNRTSVMLKDRWRTMKKLKLISSDSED

SEQ ID NO: 21974 - protein, 70 aa, Synthetic construct
SRIPVSKSQPVTPEKHRARKRQAWLWEEDKNLRSGVRKYGEGNWSKILLHYKFNNRTSVMLKDRWRTMKK

SEQ ID NO: 21975 - protein, 70 aa, Synthetic construct
SAFAELRECIPNVPADTKLSKIKTLRLATSYIAYLMDVLAKDAQSGDPEAFKAELRKRELQQHEGFPPAL

SEQ ID NO: 21976 - protein, 70 aa, Synthetic construct
CGPINVKTEPMEDSGISLKAEAVSVKKESEDPNYYQYNMQGSHPSSTSNEVIEMELPMEDSTPLVPSEEP

SEQ ID NO: 21977 - protein, 70 aa, Synthetic construct
ERSIVVKTEPMEDSGISLKAEAVSVKKESEDPNYYQYNMQGSHPSSTSNEVIEMELPMEDSTPLVPSEEP

SEQ ID NO: 21978 - protein, 70 aa, Synthetic construct
ERSIVSPSESMEDSGISLKAEAVSVKKESEDPNYYQYNMQGSHPSSTSNEVIEMELPMEDSTPLVPSEEP

SEQ ID NO: 21979 - protein, 70 aa, Synthetic construct
ERSIVSPSESCGPINISLKAEAVSVKKESEDPNYYQYNMQGSHPSSTSNEVIEMELPMEDSTPLVPSEEP

SEQ ID NO: 21980 - protein, 70 aa, Synthetic construct
ERSIVSPSESCGPINVKTEPEAVSVKKESEDPNYYQYNMQGSHPSSTSNEVIEMELPMEDSTPLVPSEEP

SEQ ID NO: 21981 - protein, 70 aa, Synthetic construct
ERSIVSPSESCGPINVKTEPMEDSGKKESEDPNYYQYNMQGSHPSSTSNEVIEMELPMEDSTPLVPSEEP

SEQ ID NO: 21982 - protein, 70 aa, Synthetic construct
ERSIVSPSESCGPINVKTEPMEDSGISLKADPNYYQYNMQGSHPSSTSNEVIEMELPMEDSTPLVPSEEP

SEQ ID NO: 21983 - protein, 70 aa, Synthetic construct
ERSIVSPSESCGPINVKTEPMEDSGISLKAEAVSVQYNMQGSHPSSTSNEVIEMELPMEDSTPLVPSEEP

SEQ ID NO: 21984 - protein, 70 aa, Synthetic construct
ERSIVSPSESCGPINVKTEPMEDSGISLKAEAVSVKKESEGSHPSSTSNEVIEMELPMEDSTPLVPSEEP

SEQ ID NO: 21985 - protein, 70 aa, Synthetic construct
ERSIVSPSESCGPINVKTEPMEDSGISLKAEAVSVKKESEDPNYYSTSNEVIEMELPMEDSTPLVPSEEP

SEQ ID NO: 21986 - protein, 70 aa, Synthetic construct
ERSIVSPSESCGPINVKTEPMEDSGISLKAEAVSVKKESEDPNYYQYNMQVIEMELPMEDSTPLVPSEEP

SEQ ID NO: 21987 - protein, 70 aa, Synthetic construct
ERSIVSPSESCGPINVKTEPMEDSGISLKAEAVSVKKESEDPNYYQYNMQGSHPSLPMEDSTPLVPSEEP

SEQ ID NO: 21988 - protein, 70 aa, Synthetic construct
ERSIVSPSESCGPINVKTEPMEDSGISLKAEAVSVKKESEDPNYYQYNMQGSHPSSTSNESTPLVPSEEP

SEQ ID NO: 21989 - protein, 70 aa, Synthetic construct
ERSIVSPSESCGPINVKTEPMEDSGISLKAEAVSVKKESEDPNYYQYNMQGSHPSSTSNEVIEMEPSEEP

SEQ ID NO: 21990 - protein, 70 aa, Synthetic construct
ERSIVSPSESCGPINVKTEPMEDSGISLKAEAVSVKKESEDPNYYQYNMQGSHPSSTSNEVIEMELPMED

SEQ ID NO: 21991 - protein, 70 aa, Synthetic construct
SPAGKFSSSFAIDSILRKPFRSRRLRDTAPGTTLQWGAAPCPPLPAFPALLPAAPCRALLPLCAYGAGEP

SEQ ID NO: 21992 - protein, 70 aa, Synthetic construct
RSPARFSSSFAIDSILRKPFRSRRLRDTAPGTTLQWGAAPCPPLPAFPALLPAAPCRALLPLCAYGAGEP

SEQ ID NO: 21993 - protein, 70 aa, Synthetic construct
RSPARQEERASPAGKFSSSFAIDSILRKPFGTTLQWGAAPCPPLPAFPALLPAAPCRALLPLCAYGAGEP

SEQ ID NO: 21994 - protein, 70 aa, Synthetic construct
RSPARQEERASPAGKFSSSFAIDSILRKPFRSRRLWGAAPCPPLPAFPALLPAAPCRALLPLCAYGAGEP

SEQ ID NO: 21995 - protein, 70 aa, Synthetic construct
RSPARQEERASPAGKFSSSFAIDSILRKPFRSRRLRDTAPCPPLPAFPALLPAAPCRALLPLCAYGAGEP

SEQ ID NO: 21996 - protein, 70 aa, Synthetic construct
RSPARQEERASPAGKFSSSFAIDSILRKPFRSRRLRDTAPGTTLQAFPALLPAAPCRALLPLCAYGAGEP

SEQ ID NO: 21997 - protein, 70 aa, Synthetic construct
RSPARQEERASPAGKFSSSFAIDSILRKPFRSRRLRDTAPGTTLQWGAAPLPAAPCRALLPLCAYGAGEP

SEQ ID NO: 21998 - protein, 70 aa, Synthetic construct
RSPARQEERASPAGKFSSSFAIDSILRKPFRSRRLRDTAPGTTLQWGAAPCPPLPCRALLPLCAYGAGEP

SEQ ID NO: 21999 - protein, 70 aa, Synthetic construct
RSPARQEERASPAGKFSSSFAIDSILRKPFRSRRLRDTAPGTTLQWGAAPCPPLPAFPALPLCAYGAGEP

SEQ ID NO: 22000 - protein, 70 aa, Synthetic construct
RSPARQEERASPAGKFSSSFAIDSILRKPFRSRRLRDTAPGTTLQWGAAPCPPLPAFPALLPAAPGAGEP

SEQ ID NO: 22001 - protein, 70 aa, Synthetic construct
RSPARQEERASPAGKFSSSFAIDSILRKPFRSRRLRDTAPGTTLQWGAAPCPPLPAFPALLPAAPCRALL

SEQ ID NO: 22002 - protein, 70 aa, Synthetic construct
ICCVCLGDNSEDADEIIQCDNCGITVHEGCYGVDGESDSIMSSASENSTEPWFCDACKCGVSPSCELCPN

SEQ ID NO: 22003 - protein, 70 aa, Synthetic construct
WSSQKLGDNSEDADEIIQCDNCGITVHEGCYGVDGESDSIMSSASENSTEPWFCDACKCGVSPSCELCPN

SEQ ID NO: 22004 - protein, 70 aa, Synthetic construct
WSSQKMDHILEDADEIIQCDNCGITVHEGCYGVDGESDSIMSSASENSTEPWFCDACKCGVSPSCELCPN

SEQ ID NO: 22005 - protein, 70 aa, Synthetic construct
WSSQKMDHILICCVCLGDNSNCGITVHEGCYGVDGESDSIMSSASENSTEPWFCDACKCGVSPSCELCPN

SEQ ID NO: 22006 - protein, 70 aa, Synthetic construct
WSSQKMDHILICCVCLGDNSEDADEVHEGCYGVDGESDSIMSSASENSTEPWFCDACKCGVSPSCELCPN

SEQ ID NO: 22007 - protein, 70 aa, Synthetic construct
WSSQKMDHILICCVCLGDNSEDADEIIQCDYGVDGESDSIMSSASENSTEPWFCDACKCGVSPSCELCPN

SEQ ID NO: 22008 - protein, 70 aa, Synthetic construct
WSSQKMDHILICCVCLGDNSEDADEIIQCDNCGITESDSIMSSASENSTEPWFCDACKCGVSPSCELCPN

SEQ ID NO: 22009 - protein, 70 aa, Synthetic construct
WSSQKMDHILICCVCLGDNSEDADEIIQCDNCGITVHEGCYGVDGENSTEPWFCDACKCGVSPSCELCPN

SEQ ID NO: 22010 - protein, 70 aa, Synthetic construct
WSSQKMDHILICCVCLGDNSEDADEIIQCDNCGITVHEGCYGVDGESDSIPWFCDACKCGVSPSCELCPN

SEQ ID NO: 22011 - protein, 70 aa, Synthetic construct
WSSQKMDHILICCVCLGDNSEDADEIIQCDNCGITVHEGCYGVDGESDSIMSSASACKCGVSPSCELCPN

SEQ ID NO: 22012 - protein, 70 aa, Synthetic construct
WSSQKMDHILICCVCLGDNSEDADEIIQCDNCGITVHEGCYGVDGESDSIMSSASENSTEVSPSCELCPN

SEQ ID NO: 22013 - protein, 70 aa, Synthetic construct
WSSQKMDHILICCVCLGDNSEDADEIIQCDNCGITVHEGCYGVDGESDSIMSSASENSTEPWFCDELCPN

SEQ ID NO: 22014 - protein, 70 aa, Synthetic construct
WSSQKMDHILICCVCLGDNSEDADEIIQCDNCGITVHEGCYGVDGESDSIMSSASENSTEPWFCDACKCG

SEQ ID NO: 22015 - protein, 70 aa, Synthetic construct
NMEEQPINIGELQLVQVPVPVTVPVATTSVEELQGAYENEVSKEGLAESEPMICHTLPLPEGFQVVKVGA

SEQ ID NO: 22016 - protein, 70 aa, Synthetic construct
DTQIIPINIGELQLVQVPVPVTVPVATTSVEELQGAYENEVSKEGLAESEPMICHTLPLPEGFQVVKVGA

SEQ ID NO: 22017 - protein, 70 aa, Synthetic construct
DTQIITLQVVELQLVQVPVPVTVPVATTSVEELQGAYENEVSKEGLAESEPMICHTLPLPEGFQVVKVGA

SEQ ID NO: 22018 - protein, 70 aa, Synthetic construct
DTQIITLQVVNMEEQQVPVPVTVPVATTSVEELQGAYENEVSKEGLAESEPMICHTLPLPEGFQVVKVGA

SEQ ID NO: 22019 - protein, 70 aa, Synthetic construct
DTQIITLQVVNMEEQPINIGVTVPVATTSVEELQGAYENEVSKEGLAESEPMICHTLPLPEGFQVVKVGA

SEQ ID NO: 22020 - protein, 70 aa, Synthetic construct
DTQIITLQVVNMEEQPINIGELQLVATTSVEELQGAYENEVSKEGLAESEPMICHTLPLPEGFQVVKVGA

SEQ ID NO: 22021 - protein, 70 aa, Synthetic construct
DTQIITLQVVNMEEQPINIGELQLVQVPVPEELQGAYENEVSKEGLAESEPMICHTLPLPEGFQVVKVGA

SEQ ID NO: 22022 - protein, 70 aa, Synthetic construct
DTQIITLQVVNMEEQPINIGELQLVQVPVPVTVPVAYENEVSKEGLAESEPMICHTLPLPEGFQVVKVGA

SEQ ID NO: 22023 - protein, 70 aa, Synthetic construct
DTQIITLQVVNMEEQPINIGELQLVQVPVPVTVPVATTSVVSKEGLAESEPMICHTLPLPEGFQVVKVGA

SEQ ID NO: 22024 - protein, 70 aa, Synthetic construct
DTQIITLQVVNMEEQPINIGELQLVQVPVPVTVPVATTSVEELQGLAESEPMICHTLPLPEGFQVVKVGA

SEQ ID NO: 22025 - protein, 70 aa, Synthetic construct
DTQIITLQVVNMEEQPINIGELQLVQVPVPVTVPVATTSVEELQGAYENEPMICHTLPLPEGFQVVKVGA

SEQ ID NO: 22026 - protein, 70 aa, Synthetic construct
DTQIITLQVVNMEEQPINIGELQLVQVPVPVTVPVATTSVEELQGAYENEVSKEGTLPLPEGFQVVKVGA

SEQ ID NO: 22027 - protein, 70 aa, Synthetic construct
PMICHTLPLPEGFQVVKVGAELPPQEDPSWQKDPDYQPPAKKTKKTKKSKLRYTEEGKDVDVSVYDFEEE

SEQ ID NO: 22028 - protein, 70 aa, Synthetic construct
PMICHTLPLPEGFQVVKVGANGEVEEDPSWQKDPDYQPPAKKTKKTKKSKLRYTEEGKDVDVSVYDFEEE

SEQ ID NO: 22029 - protein, 70 aa, Synthetic construct
PMICHTLPLPEGFQVVKVGANGEVETLEQGQKDPDYQPPAKKTKKTKKSKLRYTEEGKDVDVSVYDFEEE

SEQ ID NO: 22030 - protein, 70 aa, Synthetic construct
PMICHTLPLPEGFQVVKVGANGEVETLEQGELPPQYQPPAKKTKKTKKSKLRYTEEGKDVDVSVYDFEEE

SEQ ID NO: 22031 - protein, 70 aa, Synthetic construct
PMICHTLPLPEGFQVVKVGANGEVETLEQGELPPQEDPSWKKTKKTKKSKLRYTEEGKDVDVSVYDFEEE

SEQ ID NO: 22032 - protein, 70 aa, Synthetic construct
PMICHTLPLPEGFQVVKVGANGEVETLEQGELPPQEDPSWQKDPDTKKSKLRYTEEGKDVDVSVYDFEEE

SEQ ID NO: 22033 - protein, 70 aa, Synthetic construct
PMICHTLPLPEGFQVVKVGANGEVETLEQGELPPQEDPSWQKDPDYQPPALRYTEEGKDVDVSVYDFEEE

SEQ ID NO: 22034 - protein, 70 aa, Synthetic construct
PMICHTLPLPEGFQVVKVGANGEVETLEQGELPPQEDPSWQKDPDYQPPAKKTKKEGKDVDVSVYDFEEE

SEQ ID NO: 22035 - protein, 70 aa, Synthetic construct
PMICHTLPLPEGFQVVKVGANGEVETLEQGELPPQEDPSWQKDPDYQPPAKKTKKTKKSKDVSVYDFEEE

SEQ ID NO: 22036 - protein, 70 aa, Synthetic construct
PMICHTLPLPEGFQVVKVGANGEVETLEQGELPPQEDPSWQKDPDYQPPAKKTKKTKKSKLRYTEDFEEE

SEQ ID NO: 22037 - protein, 70 aa, Synthetic construct
PMICHTLPLPEGFQVVKVGANGEVETLEQGELPPQEDPSWQKDPDYQPPAKKTKKTKKSKLRYTEEGKDV

SEQ ID NO: 22038 - protein, 70 aa, Synthetic construct
RPHRYRSFMIEEILTEPPGPKGAAPAAAAAAAGELLKFGVQALLAARPFHSHLAVLKAEQAAVFKFPLAP

SEQ ID NO: 22039 - protein, 70 aa, Synthetic construct
FGPPEGCADHRPHRYRSFMIEEILTEPPGPAAGELLKFGVQALLAARPFHSHLAVLKAEQAAVFKFPLAP

SEQ ID NO: 22040 - protein, 70 aa, Synthetic construct
FGPPEGCADHRPHRYRSFMIEEILTEPPGPKGAAPLKFGVQALLAARPFHSHLAVLKAEQAAVFKFPLAP

SEQ ID NO: 22041 - protein, 70 aa, Synthetic construct
FGPPEGCADHRPHRYRSFMIEEILTEPPGPKGAAPAAAAAQALLAARPFHSHLAVLKAEQAAVFKFPLAP

SEQ ID NO: 22042 - protein, 70 aa, Synthetic construct
FGPPEGCADHRPHRYRSFMIEEILTEPPGPKGAAPAAAAAAAGELARPFHSHLAVLKAEQAAVFKFPLAP

SEQ ID NO: 22043 - protein, 70 aa, Synthetic construct
FGPPEGCADHRPHRYRSFMIEEILTEPPGPKGAAPAAAAAAAGELLKFGVSHLAVLKAEQAAVFKFPLAP

SEQ ID NO: 22044 - protein, 70 aa, Synthetic construct
FGPPEGCADHRPHRYRSFMIEEILTEPPGPKGAAPAAAAAAAGELLKFGVQALLALKAEQAAVFKFPLAP

SEQ ID NO: 22045 - protein, 70 aa, Synthetic construct
FGPPEGCADHRPHRYRSFMIEEILTEPPGPKGAAPAAAAAAAGELLKFGVQALLAARPFHAAVFKFPLAP

SEQ ID NO: 22046 - protein, 70 aa, Synthetic construct
FGPPEGCADHRPHRYRSFMIEEILTEPPGPKGAAPAAAAAAAGELLKFGVQALLAARPFHSHLAVFPLAP

SEQ ID NO: 22047 - protein, 70 aa, Synthetic construct
FGPPEGCADHRPHRYRSFMIEEILTEPPGPKGAAPAAAAAAAGELLKFGVQALLAARPFHSHLAVLKAEQ

SEQ ID NO: 22048 - protein, 70 aa, Synthetic construct
RGQRVPLYLSKAPQQMMGSLKLLPPPPIMSARVLPRPSPSRGPSTAWLSGPELIALTGLLQMSQGEPRPS

SEQ ID NO: 22049 - protein, 70 aa, Synthetic construct
DVFLSPLYLSKAPQQMMGSLKLLPPPPIMSARVLPRPSPSRGPSTAWLSGPELIALTGLLQMSQGEPRPS

SEQ ID NO: 22050 - protein, 70 aa, Synthetic construct
DVFLSDPLLPKAPQQMMGSLKLLPPPPIMSARVLPRPSPSRGPSTAWLSGPELIALTGLLQMSQGEPRPS

SEQ ID NO: 22051 - protein, 70 aa, Synthetic construct
DVFLSDPLLPRGQRVMMGSLKLLPPPPIMSARVLPRPSPSRGPSTAWLSGPELIALTGLLQMSQGEPRPS

SEQ ID NO: 22052 - protein, 70 aa, Synthetic construct
DVFLSDPLLPRGQRVPLYLSKLLPPPPIMSARVLPRPSPSRGPSTAWLSGPELIALTGLLQMSQGEPRPS

SEQ ID NO: 22053 - protein, 70 aa, Synthetic construct
DVFLSDPLLPRGQRVPLYLSKAPQQPPIMSARVLPRPSPSRGPSTAWLSGPELIALTGLLQMSQGEPRPS

SEQ ID NO: 22054 - protein, 70 aa, Synthetic construct
DVFLSDPLLPRGQRVPLYLSKAPQQMMGSLARVLPRPSPSRGPSTAWLSGPELIALTGLLQMSQGEPRPS

SEQ ID NO: 22055 - protein, 70 aa, Synthetic construct
DVFLSDPLLPRGQRVPLYLSKAPQQMMGSLKLLPPRPSPSRGPSTAWLSGPELIALTGLLQMSQGEPRPS

SEQ ID NO: 22056 - protein, 70 aa, Synthetic construct
DVFLSDPLLPRGQRVPLYLSKAPQQMMGSLKLLPPPPIMSRGPSTAWLSGPELIALTGLLQMSQGEPRPS

SEQ ID NO: 22057 - protein, 70 aa, Synthetic construct
DVFLSDPLLPRGQRVPLYLSKAPQQMMGSLKLLPPPPIMSARVLPAWLSGPELIALTGLLQMSQGEPRPS

SEQ ID NO: 22058 - protein, 70 aa, Synthetic construct
VITYAQRQAANIRERKRMFNLNEAFDQLRRKVPTFAYEKRLSRIETLRLAIVYISFMTELLESCEKKESG

SEQ ID NO: 22059 - protein, 70 aa, Synthetic construct
SLLGRQRQAANIRERKRMFNLNEAFDQLRRKVPTFAYEKRLSRIETLRLAIVYISFMTELLESCEKKESG

SEQ ID NO: 22060 - protein, 70 aa, Synthetic construct
SLLGRPKRKRNIRERKRMFNLNEAFDQLRRKVPTFAYEKRLSRIETLRLAIVYISFMTELLESCEKKESG

SEQ ID NO: 22061 - protein, 70 aa, Synthetic construct
SLLGRPKRKRVITYAKRMFNLNEAFDQLRRKVPTFAYEKRLSRIETLRLAIVYISFMTELLESCEKKESG

SEQ ID NO: 22062 - protein, 70 aa, Synthetic construct
SLLGRPKRKRVITYAQRQAALNEAFDQLRRKVPTFAYEKRLSRIETLRLAIVYISFMTELLESCEKKESG

SEQ ID NO: 22063 - protein, 70 aa, Synthetic construct
SLLGRPKRKRVITYAQRQAANIRERDQLRRKVPTFAYEKRLSRIETLRLAIVYISFMTELLESCEKKESG

SEQ ID NO: 22064 - protein, 70 aa, Synthetic construct
SLLGRPKRKRVITYAQRQAANIRERKRMFNKVPTFAYEKRLSRIETLRLAIVYISFMTELLESCEKKESG

SEQ ID NO: 22065 - protein, 70 aa, Synthetic construct
SLLGRPKRKRVITYAQRQAANIRERKRMFNLNEAFAYEKRLSRIETLRLAIVYISFMTELLESCEKKESG

SEQ ID NO: 22066 - protein, 70 aa, Synthetic construct
YYYYGPPHMPPPTRGRGRGGRGGYGYPPDYYGYEDYYDYYGYDYHNYRGGYEDPYYGYEDFQVGARGRGG

SEQ ID NO: 22067 - protein, 70 aa, Synthetic construct
QAAKNQMYDDPPTRGRGRGGRGGYGYPPDYYGYEDYYDYYGYDYHNYRGGYEDPYYGYEDFQVGARGRGG

SEQ ID NO: 22068 - protein, 70 aa, Synthetic construct
QAAKNQMYDDYYYYGRGRGGRGGYGYPPDYYGYEDYYDYYGYDYHNYRGGYEDPYYGYEDFQVGARGRGG

SEQ ID NO: 22069 - protein, 70 aa, Synthetic construct
QAAKNQMYDDYYYYGPPHMPRGGYGYPPDYYGYEDYYDYYGYDYHNYRGGYEDPYYGYEDFQVGARGRGG

SEQ ID NO: 22070 - protein, 70 aa, Synthetic construct
QAAKNQMYDDYYYYGPPHMPPPTRGYPPDYYGYEDYYDYYGYDYHNYRGGYEDPYYGYEDFQVGARGRGG

SEQ ID NO: 22071 - protein, 70 aa, Synthetic construct
QAAKNQMYDDYYYYGPPHMPPPTRGRGRGGYGYEDYYDYYGYDYHNYRGGYEDPYYGYEDFQVGARGRGG

SEQ ID NO: 22072 - protein, 70 aa, Synthetic construct
QAAKNQMYDDYYYYGPPHMPPPTRGRGRGGRGGYGYYDYYGYDYHNYRGGYEDPYYGYEDFQVGARGRGG

SEQ ID NO: 22073 - protein, 70 aa, Synthetic construct
QAAKNQMYDDYYYYGPPHMPPPTRGRGRGGRGGYGYPPDYYGYEDYYDYYYEDPYYGYEDFQVGARGRGG

SEQ ID NO: 22074 - protein, 70 aa, Synthetic construct
QAAKNQMYDDYYYYGPPHMPPPTRGRGRGGRGGYGYPPDYYGYEDYYDYYGYDYHYGYEDFQVGARGRGG

SEQ ID NO: 22075 - protein, 70 aa, Synthetic construct
QAAKNQMYDDYYYYGPPHMPPPTRGRGRGGRGGYGYPPDYYGYEDYYDYYGYDYHNYRGGFQVGARGRGG

SEQ ID NO: 22076 - protein, 70 aa, Synthetic construct
QAAKNQMYDDYYYYGPPHMPPPTRGRGRGGRGGYGYPPDYYGYEDYYDYYGYDYHNYRGGYEDPYRGRGG

SEQ ID NO: 22077 - protein, 70 aa, Synthetic construct
QAAKNQMYDDYYYYGPPHMPPPTRGRGRGGRGGYGYPPDYYGYEDYYDYYGYDYHNYRGGYEDPYYGYED

SEQ ID NO: 22078 - protein, 70 aa, Synthetic construct
RTKDKYRVVYTDHQRLELEKEFHYSRYITIGLTERQVKIWFQNRRAKERKVNKKKQQQQQPPQPPMAHDI

SEQ ID NO: 22079 - protein, 70 aa, Synthetic construct
RTKDKYRVVYTDHQRLELEKEFHYSRYITIRRKSELAANLGLTERQVKIWVNKKKQQQQQPPQPPMAHDI

SEQ ID NO: 22080 - protein, 70 aa, Synthetic construct
RTKDKYRVVYTDHQRLELEKEFHYSRYITIRRKSELAANLGLTERQVKIWFQNRRAKERKPPQPPMAHDI

SEQ ID NO: 22081 - protein, 70 aa, Synthetic construct
RTKDKYRVVYTDHQRLELEKEFHYSRYITIRRKSELAANLGLTERQVKIWFQNRRAKERKVNKKKMAHDI

SEQ ID NO: 22082 - protein, 70 aa, Synthetic construct
RTKDKYRVVYTDHQRLELEKEFHYSRYITIRRKSELAANLGLTERQVKIWFQNRRAKERKVNKKKQQQQQ

SEQ ID NO: 22083 - protein, 70 aa, Synthetic construct
VQYAPERPGPQPTAETTRQFLMSDKPLHLEASLDKEIYYHGEPISVNVHVTNNTNKTVKKIKISVRQYAD

SEQ ID NO: 22084 - protein, 70 aa, Synthetic construct
RNSVRERPGPQPTAETTRQFLMSDKPLHLEASLDKEIYYHGEPISVNVHVTNNTNKTVKKIKISVRQYAD

SEQ ID NO: 22085 - protein, 70 aa, Synthetic construct
RNSVRLVIRKQPTAETTRQFLMSDKPLHLEASLDKEIYYHGEPISVNVHVTNNTNKTVKKIKISVRQYAD

SEQ ID NO: 22086 - protein, 70 aa, Synthetic construct
RNSVRLVIRKVQYAPTTRQFLMSDKPLHLEASLDKEIYYHGEPISVNVHVTNNTNKTVKKIKISVRQYAD

SEQ ID NO: 22087 - protein, 70 aa, Synthetic construct
RNSVRLVIRKVQYAPERPGPLMSDKPLHLEASLDKEIYYHGEPISVNVHVTNNTNKTVKKIKISVRQYAD

SEQ ID NO: 22088 - protein, 70 aa, Synthetic construct
RNSVRLVIRKVQYAPERPGPQPTAEPLHLEASLDKEIYYHGEPISVNVHVTNNTNKTVKKIKISVRQYAD

SEQ ID NO: 22089 - protein, 70 aa, Synthetic construct
RNSVRLVIRKVQYAPERPGPQPTAETTRQFASLDKEIYYHGEPISVNVHVTNNTNKTVKKIKISVRQYAD

SEQ ID NO: 22090 - protein, 70 aa, Synthetic construct
RNSVRLVIRKVQYAPERPGPQPTAETTRQFLMSDKEIYYHGEPISVNVHVTNNTNKTVKKIKISVRQYAD

SEQ ID NO: 22091 - protein, 70 aa, Synthetic construct
RNSVRLVIRKVQYAPERPGPQPTAETTRQFLMSDKPLHLEGEPISVNVHVTNNTNKTVKKIKISVRQYAD

SEQ ID NO: 22092 - protein, 70 aa, Synthetic construct
RNSVRLVIRKVQYAPERPGPQPTAETTRQFLMSDKPLHLEASLDKVNVHVTNNTNKTVKKIKISVRQYAD

SEQ ID NO: 22093 - protein, 70 aa, Synthetic construct
RNSVRLVIRKVQYAPERPGPQPTAETTRQFLMSDKPLHLEASLDKEIYYHTNNTNKTVKKIKISVRQYAD

SEQ ID NO: 22094 - protein, 70 aa, Synthetic construct
RNSVRLVIRKVQYAPERPGPQPTAETTRQFLMSDKPLHLEASLDKEIYYHGEPISKTVKKIKISVRQYAD

SEQ ID NO: 22095 - protein, 70 aa, Synthetic construct
GPPRPHIKTEPRGSPDYGSCSGQSSATPAAPAGPFAGSQGDYGDLQASSYYGAYPGYAPGLYQYPCFHSP

SEQ ID NO: 22096 - protein, 70 aa, Synthetic construct
GPPRPHIKTEQPSPGDYGSCSGQSSATPAAPAGPFAGSQGDYGDLQASSYYGAYPGYAPGLYQYPCFHSP

SEQ ID NO: 22097 - protein, 70 aa, Synthetic construct
GPPRPHIKTEQPSPGHYGDQSGQSSATPAAPAGPFAGSQGDYGDLQASSYYGAYPGYAPGLYQYPCFHSP

SEQ ID NO: 22098 - protein, 70 aa, Synthetic construct
GPPRPHIKTEQPSPGHYGDQPRGSPATPAAPAGPFAGSQGDYGDLQASSYYGAYPGYAPGLYQYPCFHSP

SEQ ID NO: 22099 - protein, 70 aa, Synthetic construct
GPPRPHIKTEQPSPGHYGDQPRGSPDYGSCPAGPFAGSQGDYGDLQASSYYGAYPGYAPGLYQYPCFHSP

SEQ ID NO: 22100 - protein, 70 aa, Synthetic construct
GPPRPHIKTEQPSPGHYGDQPRGSPDYGSCSGQSSAGSQGDYGDLQASSYYGAYPGYAPGLYQYPCFHSP

SEQ ID NO: 22101 - protein, 70 aa, Synthetic construct
GPPRPHIKTEQPSPGHYGDQPRGSPDYGSCSGQSSATPAADYGDLQASSYYGAYPGYAPGLYQYPCFHSP

SEQ ID NO: 22102 - protein, 70 aa, Synthetic construct
GPPRPHIKTEQPSPGHYGDQPRGSPDYGSCSGQSSATPAAPAGPFQASSYYGAYPGYAPGLYQYPCFHSP

SEQ ID NO: 22103 - protein, 70 aa, Synthetic construct
GPPRPHIKTEQPSPGHYGDQPRGSPDYGSCSGQSSATPAAPAGPFAGSQGYGAYPGYAPGLYQYPCFHSP

SEQ ID NO: 22104 - protein, 70 aa, Synthetic construct
GPPRPHIKTEQPSPGHYGDQPRGSPDYGSCSGQSSATPAAPAGPFAGSQGDYGDLGYAPGLYQYPCFHSP

SEQ ID NO: 22105 - protein, 70 aa, Synthetic construct
GPPRPHIKTEQPSPGHYGDQPRGSPDYGSCSGQSSATPAAPAGPFAGSQGDYGDLQASSYLYQYPCFHSP

SEQ ID NO: 22106 - protein, 70 aa, Synthetic construct
GPPRPHIKTEQPSPGHYGDQPRGSPDYGSCSGQSSATPAAPAGPFAGSQGDYGDLQASSYYGAYPCFHSP

SEQ ID NO: 22107 - protein, 70 aa, Synthetic construct
GPPRPHIKTEQPSPGHYGDQPRGSPDYGSCSGQSSATPAAPAGPFAGSQGDYGDLQASSYYGAYPGYAPG

SEQ ID NO: 22108 - protein, 70 aa, Synthetic construct
KVYIFGTVDIVESEPENDHGVELLDQNSSIRVPREKMVYMTVNDSQPEDEDLNVAEIADEVYMEVIVGEE

SEQ ID NO: 22109 - protein, 70 aa, Synthetic construct
KVYIFKADPGVESEPENDHGVELLDQNSSIRVPREKMVYMTVNDSQPEDEDLNVAEIADEVYMEVIVGEE

SEQ ID NO: 22110 - protein, 70 aa, Synthetic construct
KVYIFKADPGEDDLGENDHGVELLDQNSSIRVPREKMVYMTVNDSQPEDEDLNVAEIADEVYMEVIVGEE

SEQ ID NO: 22111 - protein, 70 aa, Synthetic construct
KVYIFKADPGEDDLGGTVDIVELLDQNSSIRVPREKMVYMTVNDSQPEDEDLNVAEIADEVYMEVIVGEE

SEQ ID NO: 22112 - protein, 70 aa, Synthetic construct
KVYIFKADPGEDDLGGTVDIVESEPQNSSIRVPREKMVYMTVNDSQPEDEDLNVAEIADEVYMEVIVGEE

SEQ ID NO: 22113 - protein, 70 aa, Synthetic construct
KVYIFKADPGEDDLGGTVDIVESEPENDHGRVPREKMVYMTVNDSQPEDEDLNVAEIADEVYMEVIVGEE

SEQ ID NO: 22114 - protein, 70 aa, Synthetic construct
KVYIFKADPGEDDLGGTVDIVESEPENDHGVELLDQNSSIRVPREKMVYMDLNVAEIADEVYMEVIVGEE

SEQ ID NO: 22115 - protein, 70 aa, Synthetic construct
KVYIFKADPGEDDLGGTVDIVESEPENDHGVELLDQNSSIRVPREKMVYMTVNDSEIADEVYMEVIVGEE

SEQ ID NO: 22116 - protein, 70 aa, Synthetic construct
KVYIFKADPGEDDLGGTVDIVESEPENDHGVELLDQNSSIRVPREKMVYMTVNDSQPEDEVYMEVIVGEE

SEQ ID NO: 22117 - protein, 70 aa, Synthetic construct
TVNDSQPEDEDLNVAEIADEVYMEVIVGEEDAAAAAAAAAVHEQQMDDNEIKTFMPIAWAAAYGNNSDGI

SEQ ID NO: 22118 - protein, 70 aa, Synthetic construct
RVPREQPEDEDLNVAEIADEVYMEVIVGEEDAAAAAAAAAVHEQQMDDNEIKTFMPIAWAAAYGNNSDGI

SEQ ID NO: 22119 - protein, 70 aa, Synthetic construct
RVPREKMVYMDLNVAEIADEVYMEVIVGEEDAAAAAAAAAVHEQQMDDNEIKTFMPIAWAAAYGNNSDGI

SEQ ID NO: 22120 - protein, 70 aa, Synthetic construct
RVPREKMVYMTVNDSEIADEVYMEVIVGEEDAAAAAAAAAVHEQQMDDNEIKTFMPIAWAAAYGNNSDGI

SEQ ID NO: 22121 - protein, 70 aa, Synthetic construct
RVPREKMVYMTVNDSQPEDEVYMEVIVGEEDAAAAAAAAAVHEQQMDDNEIKTFMPIAWAAAYGNNSDGI

SEQ ID NO: 22122 - protein, 70 aa, Synthetic construct
RVPREKMVYMTVNDSQPEDEDLNVAEIADEVYMEVIVGEEVHEQQMDDNEIKTFMPIAWAAAYGNNSDGI

SEQ ID NO: 22123 - protein, 70 aa, Synthetic construct
RVPREKMVYMTVNDSQPEDEDLNVAEIADEVYMEVIVGEEDAAAAMDDNEIKTFMPIAWAAAYGNNSDGI

SEQ ID NO: 22124 - protein, 70 aa, Synthetic construct
RVPREKMVYMTVNDSQPEDEDLNVAEIADEVYMEVIVGEEDAAAAAAAAAIKTFMPIAWAAAYGNNSDGI

SEQ ID NO: 22125 - protein, 70 aa, Synthetic construct
RVPREKMVYMTVNDSQPEDEDLNVAEIADEVYMEVIVGEEDAAAAAAAAAVHEQQPIAWAAAYGNNSDGI

SEQ ID NO: 22126 - protein, 70 aa, Synthetic construct
RVPREKMVYMTVNDSQPEDEDLNVAEIADEVYMEVIVGEEDAAAAAAAAAVHEQQMDDNEIKTFMNSDGI

SEQ ID NO: 22127 - protein, 70 aa, Synthetic construct
RVPREKMVYMTVNDSQPEDEDLNVAEIADEVYMEVIVGEEDAAAAAAAAAVHEQQMDDNEIKTFMPIAWA

SEQ ID NO: 22128 - protein, 70 aa, Synthetic construct
APAAINRSIPCKVIVDHSTTLTSSLSLTVSVESSEASLDLQGRPVRTEASVQPVACPQVSVISRPEPVAN

SEQ ID NO: 22129 - protein, 70 aa, Synthetic construct
GKPQQNRSIPCKVIVDHSTTLTSSLSLTVSVESSEASLDLQGRPVRTEASVQPVACPQVSVISRPEPVAN

SEQ ID NO: 22130 - protein, 70 aa, Synthetic construct
GKPQQPPGGFAPAAINRSIPCKVIVDHSTTLTSSLSLTVSQGRPVRTEASVQPVACPQVSVISRPEPVAN

SEQ ID NO: 22131 - protein, 70 aa, Synthetic construct
GKPQQPPGGFAPAAINRSIPCKVIVDHSTTLTSSLSLTVSVESSERTEASVQPVACPQVSVISRPEPVAN

SEQ ID NO: 22132 - protein, 70 aa, Synthetic construct
GKPQQPPGGFAPAAINRSIPCKVIVDHSTTLTSSLSLTVSVESSEASLDLVQPVACPQVSVISRPEPVAN

SEQ ID NO: 22133 - protein, 70 aa, Synthetic construct
GKPQQPPGGFAPAAINRSIPCKVIVDHSTTLTSSLSLTVSVESSEASLDLQGRPVCPQVSVISRPEPVAN

SEQ ID NO: 22134 - protein, 70 aa, Synthetic construct
EGVWSPDIEQSFQEALAIYPPCGRRYGRNELIARYIKLRTGKTRTRKQVSSHIQVLARKKVREYQVGIKA

SEQ ID NO: 22135 - protein, 70 aa, Synthetic construct
EGVWSPDIEQSFQEALAIYPPCGRRKIILSDEGKMYGRNEGKTRTRKQVSSHIQVLARKKVREYQVGIKA

SEQ ID NO: 22136 - protein, 70 aa, Synthetic construct
EGVWSPDIEQSFQEALAIYPPCGRRKIILSDEGKMYGRNELIARYIKLRTGKTRTRKQVSSHIQVLARKK

SEQ ID NO: 22137 - protein, 70 aa, Synthetic construct
STSIKTEPVTDEPPPGLVPSVTLTITAISTPLEKEEPPLEMNTGVDSSCQTIIPKIKLEPHEVDQFLNFS

SEQ ID NO: 22138 - protein, 70 aa, Synthetic construct
EKWYLTEPVTDEPPPGLVPSVTLTITAISTPLEKEEPPLEMNTGVDSSCQTIIPKIKLEPHEVDQFLNFS

SEQ ID NO: 22139 - protein, 70 aa, Synthetic construct
EKWYLSTDFPDEPPPGLVPSVTLTITAISTPLEKEEPPLEMNTGVDSSCQTIIPKIKLEPHEVDQFLNFS

SEQ ID NO: 22140 - protein, 70 aa, Synthetic construct
EKWYLSTDFPSTSIKGLVPSVTLTITAISTPLEKEEPPLEMNTGVDSSCQTIIPKIKLEPHEVDQFLNFS

SEQ ID NO: 22141 - protein, 70 aa, Synthetic construct
EKWYLSTDFPSTSIKTEPVTVTLTITAISTPLEKEEPPLEMNTGVDSSCQTIIPKIKLEPHEVDQFLNFS

SEQ ID NO: 22142 - protein, 70 aa, Synthetic construct
EKWYLSTDFPSTSIKTEPVTDEPPPTAISTPLEKEEPPLEMNTGVDSSCQTIIPKIKLEPHEVDQFLNFS

SEQ ID NO: 22143 - protein, 70 aa, Synthetic construct
EKWYLSTDFPSTSIKTEPVTDEPPPGLVPSPLEKEEPPLEMNTGVDSSCQTIIPKIKLEPHEVDQFLNFS

SEQ ID NO: 22144 - protein, 70 aa, Synthetic construct
EKWYLSTDFPSTSIKTEPVTDEPPPGLVPSVTLTIEPPLEMNTGVDSSCQTIIPKIKLEPHEVDQFLNFS

SEQ ID NO: 22145 - protein, 70 aa, Synthetic construct
EKWYLSTDFPSTSIKTEPVTDEPPPGLVPSVTLTITAISTMNTGVDSSCQTIIPKIKLEPHEVDQFLNFS

SEQ ID NO: 22146 - protein, 70 aa, Synthetic construct
EKWYLSTDFPSTSIKTEPVTDEPPPGLVPSVTLTITAISTPLEKEDSSCQTIIPKIKLEPHEVDQFLNFS

SEQ ID NO: 22147 - protein, 70 aa, Synthetic construct
EKWYLSTDFPSTSIKTEPVTDEPPPGLVPSVTLTITAISTPLEKEEPPLETIIPKIKLEPHEVDQFLNFS

SEQ ID NO: 22148 - protein, 70 aa, Synthetic construct
EKWYLSTDFPSTSIKTEPVTDEPPPGLVPSVTLTITAISTPLEKEEPPLEMNTGVIKLEPHEVDQFLNFS

SEQ ID NO: 22149 - protein, 70 aa, Synthetic construct
EKWYLSTDFPSTSIKTEPVTDEPPPGLVPSVTLTITAISTPLEKEEPPLEMNTGVDSSCQHEVDQFLNFS

SEQ ID NO: 22150 - protein, 70 aa, Synthetic construct
EKWYLSTDFPSTSIKTEPVTDEPPPGLVPSVTLTITAISTPLEKEEPPLEMNTGVDSSCQTIIPKFLNFS

SEQ ID NO: 22151 - protein, 70 aa, Synthetic construct
EKWYLSTDFPSTSIKTEPVTDEPPPGLVPSVTLTITAISTPLEKEEPPLEMNTGVDSSCQTIIPKIKLEP

SEQ ID NO: 22152 - protein, 70 aa, Synthetic construct
FYIEDILGRGPAAPTPAPTLPSPNSSFTSLVSPYRTPVYEPTPIHPAFSHHSAAALAAAYGPGGFGGPLY

SEQ ID NO: 22153 - protein, 70 aa, Synthetic construct
PLLQPAHPTPFYIEDILGRGPSPNSSFTSLVSPYRTPVYEPTPIHPAFSHHSAAALAAAYGPGGFGGPLY

SEQ ID NO: 22154 - protein, 70 aa, Synthetic construct
PLLQPAHPTPFYIEDILGRGPAAPTSFTSLVSPYRTPVYEPTPIHPAFSHHSAAALAAAYGPGGFGGPLY

SEQ ID NO: 22155 - protein, 70 aa, Synthetic construct
PLLQPAHPTPFYIEDILGRGPAAPTPAPTLVSPYRTPVYEPTPIHPAFSHHSAAALAAAYGPGGFGGPLY

SEQ ID NO: 22156 - protein, 70 aa, Synthetic construct
PLLQPAHPTPFYIEDILGRGPAAPTPAPTLPSPNSTPVYEPTPIHPAFSHHSAAALAAAYGPGGFGGPLY

SEQ ID NO: 22157 - protein, 70 aa, Synthetic construct
PLLQPAHPTPFYIEDILGRGPAAPTPAPTLPSPNSSFTSLPTPIHPAFSHHSAAALAAAYGPGGFGGPLY

SEQ ID NO: 22158 - protein, 70 aa, Synthetic construct
PLLQPAHPTPFYIEDILGRGPAAPTPAPTLPSPNSSFTSLVSPYRPAFSHHSAAALAAAYGPGGFGGPLY

SEQ ID NO: 22159 - protein, 70 aa, Synthetic construct
PLLQPAHPTPFYIEDILGRGPAAPTPAPTLPSPNSSFTSLVSPYRTPVYEHSAAALAAAYGPGGFGGPLY

SEQ ID NO: 22160 - protein, 70 aa, Synthetic construct
PLLQPAHPTPFYIEDILGRGPAAPTPAPTLPSPNSSFTSLVSPYRTPVYEPTPIHLAAAYGPGGFGGPLY

SEQ ID NO: 22161 - protein, 70 aa, Synthetic construct
PLLQPAHPTPFYIEDILGRGPAAPTPAPTLPSPNSSFTSLVSPYRTPVYEPTPIHPAFSHGPGGFGGPLY

SEQ ID NO: 22162 - protein, 70 aa, Synthetic construct
PLLQPAHPTPFYIEDILGRGPAAPTPAPTLPSPNSSFTSLVSPYRTPVYEPTPIHPAFSHHSAAAGGPLY

SEQ ID NO: 22163 - protein, 70 aa, Synthetic construct
PLLQPAHPTPFYIEDILGRGPAAPTPAPTLPSPNSSFTSLVSPYRTPVYEPTPIHPAFSHHSAAALAAAY

SEQ ID NO: 22164 - protein, 70 aa, Synthetic construct
RPLHKRKGGQVRFSNDQTIELEKKFRKRLAKMLQLSERQVKTWFQNRRAKWRRLKQENPQSNKKEELESL

SEQ ID NO: 22165 - protein, 70 aa, Synthetic construct
RPLHKRKGGQVRFSNDQTIELEKKFETQKYLSPPERKRLAKMLQLSERQVKTWFQNRRAKWRRLKELESL

SEQ ID NO: 22166 - protein, 70 aa, Synthetic construct
RPLHKRKGGQVRFSNDQTIELEKKFETQKYLSPPERKRLAKMLQLSERQVKTWFQNRRAKWRRLKQENPQ

SEQ ID NO: 22167 - protein, 70 aa, Synthetic construct
LTNVKTEASPESMLSPSHGSNPIEDPLEAETQHKFEMSDSLKEESGTIFGSQIKDAPGEDEEEDGVSEAA

SEQ ID NO: 22168 - protein, 70 aa, Synthetic construct
VAIGKGDETPLTNVKTEASPNPIEDPLEAETQHKFEMSDSLKEESGTIFGSQIKDAPGEDEEEDGVSEAA

SEQ ID NO: 22169 - protein, 70 aa, Synthetic construct
VAIGKGDETPLTNVKTEASPESMLSPLEAETQHKFEMSDSLKEESGTIFGSQIKDAPGEDEEEDGVSEAA

SEQ ID NO: 22170 - protein, 70 aa, Synthetic construct
VAIGKGDETPLTNVKTEASPESMLSPSHGSTQHKFEMSDSLKEESGTIFGSQIKDAPGEDEEEDGVSEAA

SEQ ID NO: 22171 - protein, 70 aa, Synthetic construct
VAIGKGDETPLTNVKTEASPESMLSPSHGSNPIEDEMSDSLKEESGTIFGSQIKDAPGEDEEEDGVSEAA

SEQ ID NO: 22172 - protein, 70 aa, Synthetic construct
VAIGKGDETPLTNVKTEASPESMLSPSHGSNPIEDPLEAELKEESGTIFGSQIKDAPGEDEEEDGVSEAA

SEQ ID NO: 22173 - protein, 70 aa, Synthetic construct
VAIGKGDETPLTNVKTEASPESMLSPSHGSNPIEDPLEAETQHKFGTIFGSQIKDAPGEDEEEDGVSEAA

SEQ ID NO: 22174 - protein, 70 aa, Synthetic construct
VAIGKGDETPLTNVKTEASPESMLSPSHGSNPIEDPLEAETQHKFEMSDSSQIKDAPGEDEEEDGVSEAA

SEQ ID NO: 22175 - protein, 70 aa, Synthetic construct
VAIGKGDETPLTNVKTEASPESMLSPSHGSNPIEDPLEAETQHKFEMSDSLKEESAPGEDEEEDGVSEAA

SEQ ID NO: 22176 - protein, 70 aa, Synthetic construct
VAIGKGDETPLTNVKTEASPESMLSPSHGSNPIEDPLEAETQHKFEMSDSLKEESGTIFGEEEDGVSEAA

SEQ ID NO: 22177 - protein, 70 aa, Synthetic construct
VAIGKGDETPLTNVKTEASPESMLSPSHGSNPIEDPLEAETQHKFEMSDSLKEESGTIFGSQIKDVSEAA

SEQ ID NO: 22178 - protein, 70 aa, Synthetic construct
VAIGKGDETPLTNVKTEASPESMLSPSHGSNPIEDPLEAETQHKFEMSDSLKEESGTIFGSQIKDAPGED

SEQ ID NO: 22179 - protein, 70 aa, Synthetic construct
ERRVIVPADPTLWSTDHVRQWLEWAVKEYGLPDVNILLFQNIDGKELCKMTKDDFQRLTPSYNADILLSH

SEQ ID NO: 22180 - protein, 70 aa, Synthetic construct
TTSQIMARKKRRGIIEKRRRDRINNSLSELRRLVPTAFEKQGSAKLEKAEILQMTGGKGYFDAHALAMDF

SEQ ID NO: 22181 - protein, 70 aa, Synthetic construct
TTSQIMARKKRRGIIEKRRRDRINNSLSELRRLVPTAFEKQGSAKLEKAEILQMTVDHLKMLQATLAMDF

SEQ ID NO: 22182 - protein, 70 aa, Synthetic construct
TTSQIMARKKRRGIIEKRRRDRINNSLSELRRLVPTAFEKQGSAKLEKAEILQMTVDHLKMLQATGGKGY

SEQ ID NO: 22183 - protein, 70 aa, Synthetic construct
ETPTGYIESLPRVVKRRVNAIEAKFYEEVHDLERKYAVLYQPLFDKRFEIINAIYEPTEEECEWKPDEED

SEQ ID NO: 22184 - protein, 70 aa, Synthetic construct
SVQEDAVAPAAGFRCTFCKGKFKKREELDRHIRILFAASQEEELISHVEKAHITAESAQGQGPNGGGEQS

SEQ ID NO: 22185 - protein, 70 aa, Synthetic construct
RAYQSIVSNGMDSFVLSSLKKEKDMKDKALADPPSMKVHGVDGGEEKPSGKSSQRKSEKSQYEPLDLSVR

SEQ ID NO: 22186 - protein, 70 aa, Synthetic construct
RAYQSIVSNGVNFQGLSSLKKEKDMKDKALADPPSMKVHGVDGGEEKPSGKSSQRKSEKSQYEPLDLSVR

SEQ ID NO: 22187 - protein, 70 aa, Synthetic construct
RAYQSIVSNGVNFQGSLQAFKEKDMKDKALADPPSMKVHGVDGGEEKPSGKSSQRKSEKSQYEPLDLSVR

SEQ ID NO: 22188 - protein, 70 aa, Synthetic construct
RAYQSIVSNGVNFQGSLQAFMDSFVLSSLKKEKDMMKVHGVDGGEEKPSGKSSQRKSEKSQYEPLDLSVR

SEQ ID NO: 22189 - protein, 70 aa, Synthetic construct
RAYQSIVSNGVNFQGSLQAFMDSFVLSSLKKEKDMKDKALVDGGEEKPSGKSSQRKSEKSQYEPLDLSVR

SEQ ID NO: 22190 - protein, 70 aa, Synthetic construct
RAYQSIVSNGVNFQGSLQAFMDSFVLSSLKKEKDMKDKALADPPSEKPSGKSSQRKSEKSQYEPLDLSVR

SEQ ID NO: 22191 - protein, 70 aa, Synthetic construct
RAYQSIVSNGVNFQGSLQAFMDSFVLSSLKKEKDMKDKALADPPSMKVHGKSSQRKSEKSQYEPLDLSVR

SEQ ID NO: 22192 - protein, 70 aa, Synthetic construct
RAYQSIVSNGVNFQGSLQAFMDSFVLSSLKKEKDMKDKALADPPSMKVHGVDGGEKSEKSQYEPLDLSVR

SEQ ID NO: 22193 - protein, 70 aa, Synthetic construct
RAYQSIVSNGVNFQGSLQAFMDSFVLSSLKKEKDMKDKALADPPSMKVHGVDGGEEKPSGQYEPLDLSVR

SEQ ID NO: 22194 - protein, 70 aa, Synthetic construct
QYEPLDLSVRVTVQDSIAWHGCLFCAFTTSSMELMALHLQANHLGKAKRKDNTIGVTVNCKDQAREASKM

SEQ ID NO: 22195 - protein, 70 aa, Synthetic construct
QYEPLDLSVRPDAASSIAWHGCLFCAFTTSSMELMALHLQANHLGKAKRKDNTIGVTVNCKDQAREASKM

SEQ ID NO: 22196 - protein, 70 aa, Synthetic construct
QYEPLDLSVRPDAASLPGSSGCLFCAFTTSSMELMALHLQANHLGKAKRKDNTIGVTVNCKDQAREASKM

SEQ ID NO: 22197 - protein, 70 aa, Synthetic construct
QYEPLDLSVRPDAASLPGSSVTVQDSIAWHSMELMALHLQANHLGKAKRKDNTIGVTVNCKDQAREASKM

SEQ ID NO: 22198 - protein, 70 aa, Synthetic construct
QYEPLDLSVRPDAASLPGSSVTVQDSIAWHGCLFCALHLQANHLGKAKRKDNTIGVTVNCKDQAREASKM

SEQ ID NO: 22199 - protein, 70 aa, Synthetic construct
QYEPLDLSVRPDAASLPGSSVTVQDSIAWHGCLFCAFTTSANHLGKAKRKDNTIGVTVNCKDQAREASKM

SEQ ID NO: 22200 - protein, 70 aa, Synthetic construct
QYEPLDLSVRPDAASLPGSSVTVQDSIAWHGCLFCAFTTSSMELMKAKRKDNTIGVTVNCKDQAREASKM

SEQ ID NO: 22201 - protein, 70 aa, Synthetic construct
QYEPLDLSVRPDAASLPGSSVTVQDSIAWHGCLFCAFTTSSMELMALHLQANHLGVTVNCKDQAREASKM

SEQ ID NO: 22202 - protein, 70 aa, Synthetic construct
QYEPLDLSVRPDAASLPGSSVTVQDSIAWHGCLFCAFTTSSMELMALHLQANHLGKAKRKKDQAREASKM

SEQ ID NO: 22203 - protein, 70 aa, Synthetic construct
QYEPLDLSVRPDAASLPGSSVTVQDSIAWHGCLFCAFTTSSMELMALHLQANHLGKAKRKDNTIGEASKM

SEQ ID NO: 22204 - protein, 70 aa, Synthetic construct
QYEPLDLSVRPDAASLPGSSVTVQDSIAWHGCLFCAFTTSSMELMALHLQANHLGKAKRKDNTIGVTVNC

SEQ ID NO: 22205 - protein, 70 aa, Synthetic construct
YVTYQDIHSIQAFHEQIVIAVKAPAETRLDVPAPREDSITVHIRSTNGPIDVYLCEVEQGQTSNKRSEGV

SEQ ID NO: 22206 - protein, 70 aa, Synthetic construct
TDDKEDIHSIQAFHEQIVIAVKAPAETRLDVPAPREDSITVHIRSTNGPIDVYLCEVEQGQTSNKRSEGV

SEQ ID NO: 22207 - protein, 70 aa, Synthetic construct
TDDKENERLAYVTYQQIVIAVKAPAETRLDVPAPREDSITVHIRSTNGPIDVYLCEVEQGQTSNKRSEGV

SEQ ID NO: 22208 - protein, 70 aa, Synthetic construct
TDDKENERLAYVTYQDIHSIQAFHEQIVIAVPAPREDSITVHIRSTNGPIDVYLCEVEQGQTSNKRSEGV

SEQ ID NO: 22209 - protein, 70 aa, Synthetic construct
TDDKENERLAYVTYQDIHSIQAFHEQIVIAVKAPAEDSITVHIRSTNGPIDVYLCEVEQGQTSNKRSEGV

SEQ ID NO: 22210 - protein, 70 aa, Synthetic construct
TDDKENERLAYVTYQDIHSIQAFHEQIVIAVKAPAETRLDVHIRSTNGPIDVYLCEVEQGQTSNKRSEGV

SEQ ID NO: 22211 - protein, 70 aa, Synthetic construct
TDDKENERLAYVTYQDIHSIQAFHEQIVIAVKAPAETRLDVPAPREDSITVHIRSTNGPIDVYLCRSEGV

SEQ ID NO: 22212 - protein, 70 aa, Synthetic construct
TDDKENERLAYVTYQDIHSIQAFHEQIVIAVKAPAETRLDVPAPREDSITVHIRSTNGPIDVYLCEVEQG

SEQ ID NO: 22213 - protein, 70 aa, Synthetic construct
DLENRSTANVLEETTVKKEKEDEKELVKLPVIVKLEKPLPENEEKKIIKEESDSFKENVKPIKVEVKECR

SEQ ID NO: 22214 - protein, 70 aa, Synthetic construct
EKMKSEEQPMDLENRSTANVLEETTVKKEKEDEKEEKPLPENEEKKIIKEESDSFKENVKPIKVEVKECR

SEQ ID NO: 22215 - protein, 70 aa, Synthetic construct
EKMKSEEQPMDLENRSTANVLEETTVKKEKEDEKELVKLPENEEKKIIKEESDSFKENVKPIKVEVKECR

SEQ ID NO: 22216 - protein, 70 aa, Synthetic construct
EKMKSEEQPMDLENRSTANVLEETTVKKEKEDEKELVKLPVIVKLKIIKEESDSFKENVKPIKVEVKECR

SEQ ID NO: 22217 - protein, 70 aa, Synthetic construct
EKMKSEEQPMDLENRSTANVLEETTVKKEKEDEKELVKLPVIVKLEKPLPESDSFKENVKPIKVEVKECR

SEQ ID NO: 22218 - protein, 70 aa, Synthetic construct
EKMKSEEQPMDLENRSTANVLEETTVKKEKEDEKELVKLPVIVKLEKPLPENEEKKENVKPIKVEVKECR

SEQ ID NO: 22219 - protein, 70 aa, Synthetic construct
EKMKSEEQPMDLENRSTANVLEETTVKKEKEDEKELVKLPVIVKLEKPLPENEEKKIIKEPIKVEVKECR

SEQ ID NO: 22220 - protein, 70 aa, Synthetic construct
TEKLKNDQQAKIPLKKREIKLSDDFDSPVKGPLCKSVTPTKEFLKDEIKQEEETCKRISTITALGHEGKQ

SEQ ID NO: 22221 - protein, 70 aa, Synthetic construct
HEITENDQQAKIPLKKREIKLSDDFDSPVKGPLCKSVTPTKEFLKDEIKQEEETCKRISTITALGHEGKQ

SEQ ID NO: 22222 - protein, 70 aa, Synthetic construct
HEITEKSTEEKIPLKKREIKLSDDFDSPVKGPLCKSVTPTKEFLKDEIKQEEETCKRISTITALGHEGKQ

SEQ ID NO: 22223 - protein, 70 aa, Synthetic construct
HEITEKSTEETEKLKKREIKLSDDFDSPVKGPLCKSVTPTKEFLKDEIKQEEETCKRISTITALGHEGKQ

SEQ ID NO: 22224 - protein, 70 aa, Synthetic construct
HEITEKSTEETEKLKNDQQAKIPLKDSPVKGPLCKSVTPTKEFLKDEIKQEEETCKRISTITALGHEGKQ

SEQ ID NO: 22225 - protein, 70 aa, Synthetic construct
HEITEKSTEETEKLKNDQQAKIPLKKREIKGPLCKSVTPTKEFLKDEIKQEEETCKRISTITALGHEGKQ

SEQ ID NO: 22226 - protein, 70 aa, Synthetic construct
HEITEKSTEETEKLKNDQQAKIPLKKREIKLSDDFSVTPTKEFLKDEIKQEEETCKRISTITALGHEGKQ

SEQ ID NO: 22227 - protein, 70 aa, Synthetic construct
HEITEKSTEETEKLKNDQQAKIPLKKREIKLSDDFDSPVKKEFLKDEIKQEEETCKRISTITALGHEGKQ

SEQ ID NO: 22228 - protein, 70 aa, Synthetic construct
HEITEKSTEETEKLKNDQQAKIPLKKREIKLSDDFDSPVKGPLCKDEIKQEEETCKRISTITALGHEGKQ

SEQ ID NO: 22229 - protein, 70 aa, Synthetic construct
HEITEKSTEETEKLKNDQQAKIPLKKREIKLSDDFDSPVKGPLCKSVTPTEEETCKRISTITALGHEGKQ

SEQ ID NO: 22230 - protein, 70 aa, Synthetic construct
HEITEKSTEETEKLKNDQQAKIPLKKREIKLSDDFDSPVKGPLCKSVTPTKEFLKKRISTITALGHEGKQ

SEQ ID NO: 22231 - protein, 70 aa, Synthetic construct
HEITEKSTEETEKLKNDQQAKIPLKKREIKLSDDFDSPVKGPLCKSVTPTKEFLKDEIKQITALGHEGKQ

SEQ ID NO: 22232 - protein, 70 aa, Synthetic construct
HEITEKSTEETEKLKNDQQAKIPLKKREIKLSDDFDSPVKGPLCKSVTPTKEFLKDEIKQEEETCHEGKQ

SEQ ID NO: 22233 - protein, 70 aa, Synthetic construct
ESEEAILADDDEPCKKCGLPNHPELILLCDSCDSGYHTACLRPPLMIIPDGEWFCPPCQHKLLCEKLEEQ

SEQ ID NO: 22234 - protein, 70 aa, Synthetic construct
SAASEILADDDEPCKKCGLPNHPELILLCDSCDSGYHTACLRPPLMIIPDGEWFCPPCQHKLLCEKLEEQ

SEQ ID NO: 22235 - protein, 70 aa, Synthetic construct
SAASEEEEEKDEPCKKCGLPNHPELILLCDSCDSGYHTACLRPPLMIIPDGEWFCPPCQHKLLCEKLEEQ

SEQ ID NO: 22236 - protein, 70 aa, Synthetic construct
SAASEEEEEKESEEAKCGLPNHPELILLCDSCDSGYHTACLRPPLMIIPDGEWFCPPCQHKLLCEKLEEQ

SEQ ID NO: 22237 - protein, 70 aa, Synthetic construct
SAASEEEEEKESEEAILADDNHPELILLCDSCDSGYHTACLRPPLMIIPDGEWFCPPCQHKLLCEKLEEQ

SEQ ID NO: 22238 - protein, 70 aa, Synthetic construct
SAASEEEEEKESEEAILADDDEPCKILLCDSCDSGYHTACLRPPLMIIPDGEWFCPPCQHKLLCEKLEEQ

SEQ ID NO: 22239 - protein, 70 aa, Synthetic construct
SAASEEEEEKESEEAILADDDEPCKKCGLPSCDSGYHTACLRPPLMIIPDGEWFCPPCQHKLLCEKLEEQ

SEQ ID NO: 22240 - protein, 70 aa, Synthetic construct
SAASEEEEEKESEEAILADDDEPCKKCGLPNHPELYHTACLRPPLMIIPDGEWFCPPCQHKLLCEKLEEQ

SEQ ID NO: 22241 - protein, 70 aa, Synthetic construct
SAASEEEEEKESEEAILADDDEPCKKCGLPNHPELILLCDLRPPLMIIPDGEWFCPPCQHKLLCEKLEEQ

SEQ ID NO: 22242 - protein, 70 aa, Synthetic construct
SAASEEEEEKESEEAILADDDEPCKKCGLPNHPELILLCDSCDSGMIIPDGEWFCPPCQHKLLCEKLEEQ

SEQ ID NO: 22243 - protein, 70 aa, Synthetic construct
SAASEEEEEKESEEAILADDDEPCKKCGLPNHPELILLCDSCDSGYHTACGEWFCPPCQHKLLCEKLEEQ

SEQ ID NO: 22244 - protein, 70 aa, Synthetic construct
SAASEEEEEKESEEAILADDDEPCKKCGLPNHPELILLCDSCDSGYHTACLRPPLMIIPDKLLCEKLEEQ

SEQ ID NO: 22245 - protein, 70 aa, Synthetic construct
SAASEEEEEKESEEAILADDDEPCKKCGLPNHPELILLCDSCDSGYHTACLRPPLMIIPDGEWFCKLEEQ

SEQ ID NO: 22246 - protein, 70 aa, Synthetic construct
SAASEEEEEKESEEAILADDDEPCKKCGLPNHPELILLCDSCDSGYHTACLRPPLMIIPDGEWFCPPCQH

SEQ ID NO: 22247 - protein, 70 aa, Synthetic construct [sequence omitted]

SEQ ID NO: 22248 - protein, 70 aa, Synthetic construct
QAPPPSLLELPHPLLQQTEDQFLSPTLACSSPLISFSPSLDQDDYLWGLEAGEGISDLFDSYDLGDLLIN

SEQ ID NO: 22249 - protein, 70 aa, Synthetic construct
QAPPPPSLVPPHPLLQQTEDQFLSPTLACSSPLISFSPSLDQDDYLWGLEAGEGISDLFDSYDLGDLLIN

SEQ ID NO: 22250 - protein, 70 aa, Synthetic construct
QAPPPPSLVPLEATDQQTEDQFLSPTLACSSPLISFSPSLDQDDYLWGLEAGEGISDLFDSYDLGDLLIN

SEQ ID NO: 22251 - protein, 70 aa, Synthetic construct
QAPPPPSLVPLEATDSLLELQFLSPTLACSSPLISFSPSLDQDDYLWGLEAGEGISDLFDSYDLGDLLIN

SEQ ID NO: 22252 - protein, 70 aa, Synthetic construct
QAPPPPSLVPLEATDSLLELPHPLLTLACSSPLISFSPSLDQDDYLWGLEAGEGISDLFDSYDLGDLLIN

SEQ ID NO: 22253 - protein, 70 aa, Synthetic construct
QAPPPPSLVPLEATDSLLELPHPLLQQTEDSPLISFSPSLDQDDYLWGLEAGEGISDLFDSYDLGDLLIN

SEQ ID NO: 22254 - protein, 70 aa, Synthetic construct
QAPPPPSLVPLEATDSLLELPHPLLQQTEDQFLSPFSPSLDQDDYLWGLEAGEGISDLFDSYDLGDLLIN

SEQ ID NO: 22255 - protein, 70 aa, Synthetic construct
QAPPPPSLVPLEATDSLLELPHPLLQQTEDQFLSPTLACSDQDDYLWGLEAGEGISDLFDSYDLGDLLIN

SEQ ID NO: 22256 - protein, 70 aa, Synthetic construct
QAPPPPSLVPLEATDSLLELPHPLLQQTEDQFLSPTLACSSPLISLWGLEAGEGISDLFDSYDLGDLLIN

SEQ ID NO: 22257 - protein, 70 aa, Synthetic construct
QAPPPPSLVPLEATDSLLELPHPLLQQTEDQFLSPTLACSSPLISFSPSLDQDDYSDLFDSYDLGDLLIN

SEQ ID NO: 22258 - protein, 70 aa, Synthetic construct
QAPPPPSLVPLEATDSLLELPHPLLQQTEDQFLSPTLACSSPLISFSPSLDQDDYLWGLESYDLGDLLIN

SEQ ID NO: 22259 - protein, 70 aa, Synthetic construct
IRRRGKNKVAIILNLEDDVCNLQAKKETLKREQAQCNKAINIMKQKLHDLYHDIFSRLRDDQGRPVNPNH

SEQ ID NO: 22260 - protein, 70 aa, Synthetic construct
IRRRGKNKVAAQNCRKRKLDIILNLEDDVCNLQAKCNKAINIMKQKLHDLYHDIFSRLRDDQGRPVNPNH

SEQ ID NO: 22261 - protein, 70 aa, Synthetic construct
IRRRGKNKVAAQNCRKRKLDIILNLEDDVCNLQAKKETLKREQAQCNKAINIMKQKLHDLYHDIFSRLRD

SEQ ID NO: 22262 - protein, 70 aa, Synthetic construct
HGLPLKIKKEACSQEQPFKFSYGEKCLYNVSAYDQKPQVGMRPSNPPTPSSTPVSPLHHASPNSTHTPKP

SEQ ID NO: 22263 - protein, 70 aa, Synthetic construct
HGLPLKIKKEPHSPCQPFKFSYGEKCLYNVSAYDQKPQVGMRPSNPPTPSSTPVSPLHHASPNSTHTPKP

SEQ ID NO: 22264 - protein, 70 aa, Synthetic construct
HGLPLKIKKEPHSPCSEISSSYGEKCLYNVSAYDQKPQVGMRPSNPPTPSSTPVSPLHHASPNSTHTPKP

SEQ ID NO: 22265 - protein, 70 aa, Synthetic construct
HGLPLKIKKEPHSPCSEISSACSQECLYNVSAYDQKPQVGMRPSNPPTPSSTPVSPLHHASPNSTHTPKP

SEQ ID NO: 22266 - protein, 70 aa, Synthetic construct
HGLPLKIKKEPHSPCSEISSACSQEQPFKFSAYDQKPQVGMRPSNPPTPSSTPVSPLHHASPNSTHTPKP

SEQ ID NO: 22267 - protein, 70 aa, Synthetic construct
HGLPLKIKKEPHSPCSEISSACSQEQPFKFSYGEKKPQVGMRPSNPPTPSSTPVSPLHHASPNSTHTPKP

SEQ ID NO: 22268 - protein, 70 aa, Synthetic construct
HGLPLKIKKEPHSPCSEISSACSQEQPFKFSYGEKCLYNVMRPSNPPTPSSTPVSPLHHASPNSTHTPKP

SEQ ID NO: 22269 - protein, 70 aa, Synthetic construct
HGLPLKIKKEPHSPCSEISSACSQEQPFKFSYGEKCLYNVSAYDQPPTPSSTPVSPLHHASPNSTHTPKP

SEQ ID NO: 22270 - protein, 70 aa, Synthetic construct
HGLPLKIKKEPHSPCSEISSACSQEQPFKFSYGEKCLYNVSAYDQKPQVGSTPVSPLHHASPNSTHTPKP

SEQ ID NO: 22271 - protein, 70 aa, Synthetic construct
HGLPLKIKKEPHSPCSEISSACSQEQPFKFSYGEKCLYNVSAYDQKPQVGMRPSNPLHHASPNSTHTPKP

SEQ ID NO: 22272 - protein, 70 aa, Synthetic construct
HGLPLKIKKEPHSPCSEISSACSQEQPFKFSYGEKCLYNVSAYDQKPQVGMRPSNPPTPSSPNSTHTPKP

SEQ ID NO: 22273 - protein, 70 aa, Synthetic construct
HGLPLKIKKEPHSPCSEISSACSQEQPFKFSYGEKCLYNVSAYDQKPQVGMRPSNPPTPSSTPVSHTPKP

SEQ ID NO: 22274 - protein, 70 aa, Synthetic construct
HGLPLKIKKEPHSPCSEISSACSQEQPFKFSYGEKCLYNVSAYDQKPQVGMRPSNPPTPSSTPVSPLHHA

SEQ ID NO: 22275 - protein, 70 aa, Synthetic construct
HDPVYEHNTMVGSAASQSFPPPLMIKQEPRDFAYDSEVPSCHSIYMRQEGFLAHPSRTEGCMFEKGPRQF

SEQ ID NO: 22276 - protein, 70 aa, Synthetic construct
FPPQGEHNTMVGSAASQSFPPPLMIKQEPRDFAYDSEVPSCHSIYMRQEGFLAHPSRTEGCMFEKGPRQF

SEQ ID NO: 22277 - protein, 70 aa, Synthetic construct
FPPQGFKQEYVGSAASQSFPPPLMIKQEPRDFAYDSEVPSCHSIYMRQEGFLAHPSRTEGCMFEKGPRQF

SEQ ID NO: 22278 - protein, 70 aa, Synthetic construct
FPPQGFKQEYHDPVYSQSFPPPLMIKQEPRDFAYDSEVPSCHSIYMRQEGFLAHPSRTEGCMFEKGPRQF

SEQ ID NO: 22279 - protein, 70 aa, Synthetic construct
FPPQGFKQEYHDPVYEHNTMPPLMIKQEPRDFAYDSEVPSCHSIYMRQEGFLAHPSRTEGCMFEKGPRQF

SEQ ID NO: 22280 - protein, 70 aa, Synthetic construct
FPPQGFKQEYHDPVYEHNTMVGSAAKQEPRDFAYDSEVPSCHSIYMRQEGFLAHPSRTEGCMFEKGPRQF

SEQ ID NO: 22281 - protein, 70 aa, Synthetic construct
FPPQGFKQEYHDPVYEHNTMVGSAASQSFPDFAYDSEVPSCHSIYMRQEGFLAHPSRTEGCMFEKGPRQF

SEQ ID NO: 22282 - protein, 70 aa, Synthetic construct
FPPQGFKQEYHDPVYEHNTMVGSAASQSFPPPLMISEVPSCHSIYMRQEGFLAHPSRTEGCMFEKGPRQF

SEQ ID NO: 22283 - protein, 70 aa, Synthetic construct
FPPQGFKQEYHDPVYEHNTMVGSAASQSFPPPLMIKQEPRCHSIYMRQEGFLAHPSRTEGCMFEKGPRQF

SEQ ID NO: 22284 - protein, 70 aa, Synthetic construct
FPPQGFKQEYHDPVYEHNTMVGSAASQSFPPPLMIKQEPRDFAYDMRQEGFLAHPSRTEGCMFEKGPRQF

SEQ ID NO: 22285 - protein, 70 aa, Synthetic construct
FPPQGFKQEYHDPVYEHNTMVGSAASQSFPPPLMIKQEPRDFAYDSEVPSFLAHPSRTEGCMFEKGPRQF

SEQ ID NO: 22286 - protein, 70 aa, Synthetic construct
FPPQGFKQEYHDPVYEHNTMVGSAASQSFPPPLMIKQEPRDFAYDSEVPSCHSIYSRTEGCMFEKGPRQF

SEQ ID NO: 22287 - protein, 70 aa, Synthetic construct
FPPQGFKQEYHDPVYEHNTMVGSAASQSFPPPLMIKQEPRDFAYDSEVPSCHSIYMRQEGCMFEKGPRQF

SEQ ID NO: 22288 - protein, 70 aa, Synthetic construct
FPPQGFKQEYHDPVYEHNTMVGSAASQSFPPPLMIKQEPRDFAYDSEVPSCHSIYMRQEGFLAHPGPRQF

SEQ ID NO: 22289 - protein, 70 aa, Synthetic construct
FPPQGFKQEYHDPVYEHNTMVGSAASQSFPPPLMIKQEPRDFAYDSEVPSCHSIYMRQEGFLAHPSRTEG

SEQ ID NO: 22290 - protein, 70 aa, Synthetic construct
KLVNLGFATLREHVPNGAANKKMSKVETLRSAVEYIRALQQLLDEGVLSPTISPNYSNDLNSMAGSPVSS

SEQ ID NO: 22291 - protein, 70 aa, Synthetic construct
KLVNLGFATLREHVPNGAANKKMSKVETLRSAVEYIRALQQLLDEHDAVSTISPNYSNDLNSMAGSPVSS

SEQ ID NO: 22292 - protein, 70 aa, Synthetic construct
KLVNLGFATLREHVPNGAANKKMSKVETLRSAVEYIRALQQLLDEHDAVSAAFQAYSNDLNSMAGSPVSS

SEQ ID NO: 22293 - protein, 70 aa, Synthetic construct
KLVNLGFATLREHVPNGAANKKMSKVETLRSAVEYIRALQQLLDEHDAVSAAFQAGVLSPNSMAGSPVSS

SEQ ID NO: 22294 - protein, 70 aa, Synthetic construct
KLVNLGFATLREHVPNGAANKKMSKVETLRSAVEYIRALQQLLDEHDAVSAAFQAGVLSPTISPNSPVSS

SEQ ID NO: 22295 - protein, 70 aa, Synthetic construct
KLVNLGFATLREHVPNGAANKKMSKVETLRSAVEYIRALQQLLDEHDAVSAAFQAGVLSPTISPNYSNDL

SEQ ID NO: 22296 - protein, 70 aa, Synthetic construct
AIPPLIVAETTTVPSLENLRVVLDKALTDCGELALKQLHYLRPVVVLERSKFSTPILDLFPTKKTDELCV

SEQ ID NO: 22297 - protein, 70 aa, Synthetic construct
SDSTIIVAETTTVPSLENLRVVLDKALTDCGELALKQLHYLRPVVVLERSKFSTPILDLFPTKKTDELCV

SEQ ID NO: 22298 - protein, 70 aa, Synthetic construct
SDSTIHENLTTTVPSLENLRVVLDKALTDCGELALKQLHYLRPVVVLERSKFSTPILDLFPTKKTDELCV

SEQ ID NO: 22299 - protein, 70 aa, Synthetic construct
SDSTIHENLTAIPPLLENLRVVLDKALTDCGELALKQLHYLRPVVVLERSKFSTPILDLFPTKKTDELCV

SEQ ID NO: 22300 - protein, 70 aa, Synthetic construct
SDSTIHENLTAIPPLIVAETVVLDKALTDCGELALKQLHYLRPVVVLERSKFSTPILDLFPTKKTDELCV

SEQ ID NO: 22301 - protein, 70 aa, Synthetic construct
SDSTIHENLTAIPPLIVAETTTVPSALTDCGELALKQLHYLRPVVVLERSKFSTPILDLFPTKKTDELCV

SEQ ID NO: 22302 - protein, 70 aa, Synthetic construct
SDSTIHENLTAIPPLIVAETTTVPSLENLRGELALKQLHYLRPVVVLERSKFSTPILDLFPTKKTDELCV

SEQ ID NO: 22303 - protein, 70 aa, Synthetic construct
SDSTIHENLTAIPPLIVAETTTVPSLENLRVVLDKALTDCGELALKQLHYLRPVVILDLFPTKKTDELCV

SEQ ID NO: 22304 - protein, 70 aa, Synthetic construct
SDSTIHENLTAIPPLIVAETTTVPSLENLRVVLDKALTDCGELALKQLHYLRPVVVLERSPTKKTDELCV

SEQ ID NO: 22305 - protein, 70 aa, Synthetic construct
SDSTIHENLTAIPPLIVAETTTVPSLENLRVVLDKALTDCGELALKQLHYLRPVVVLERSKFSTPDELCV

SEQ ID NO: 22306 - protein, 70 aa, Synthetic construct
SDSTIHENLTAIPPLIVAETTTVPSLENLRVVLDKALTDCGELALKQLHYLRPVVVLERSKFSTPILDLF

SEQ ID NO: 22307 - protein, 70 aa, Synthetic construct
PCRKSYEDCASGIMEDSAIKCEYMLNAIPKRLCLVCGDIASGYHYGVASCEACKAFFKRTIQGNIEYSCP

SEQ ID NO: 22308 - protein, 70 aa, Synthetic construct
MFAGAYEDCASGIMEDSAIKCEYMLNAIPKRLCLVCGDIASGYHYGVASCEACKAFFKRTIQGNIEYSCP

SEQ ID NO: 22309 - protein, 70 aa, Synthetic construct
MFAGAGLGGTSGIMEDSAIKCEYMLNAIPKRLCLVCGDIASGYHYGVASCEACKAFFKRTIQGNIEYSCP

SEQ ID NO: 22310 - protein, 70 aa, Synthetic construct
MFAGAGLGGTPCRKSDSAIKCEYMLNAIPKRLCLVCGDIASGYHYGVASCEACKAFFKRTIQGNIEYSCP

SEQ ID NO: 22311 - protein, 70 aa, Synthetic construct
MFAGAGLGGTPCRKSYEDCACEYMLNAIPKRLCLVCGDIASGYHYGVASCEACKAFFKRTIQGNIEYSCP

SEQ ID NO: 22312 - protein, 70 aa, Synthetic construct
MFAGAGLGGTPCRKSYEDCASGIMENAIPKRLCLVCGDIASGYHYGVASCEACKAFFKRTIQGNIEYSCP

SEQ ID NO: 22313 - protein, 70 aa, Synthetic construct
MFAGAGLGGTPCRKSYEDCASGIMEDSAIKRLCLVCGDIASGYHYGVASCEACKAFFKRTIQGNIEYSCP

SEQ ID NO: 22314 - protein, 70 aa, Synthetic construct
MFAGAGLGGTPCRKSYEDCASGIMEDSAIKCEYMLCGDIASGYHYGVASCEACKAFFKRTIQGNIEYSCP

SEQ ID NO: 22315 - protein, 70 aa, Synthetic construct
MFAGAGLGGTPCRKSYEDCASGIMEDSAIKCEYMLNAIPKSGYHYGVASCEACKAFFKRTIQGNIEYSCP

SEQ ID NO: 22316 - protein, 70 aa, Synthetic construct
MFAGAGLGGTPCRKSYEDCASGIMEDSAIKCEYMLNAIPKRLCLVGVASCEACKAFFKRTIQGNIEYSCP

SEQ ID NO: 22317 - protein, 70 aa, Synthetic construct
MFAGAGLGGTPCRKSYEDCASGIMEDSAIKCEYMLNAIPKRLCLVCGDIASGYHYGVASCIQGNIEYSCP

SEQ ID NO: 22318 - protein, 70 aa, Synthetic construct
MFAGAGLGGTPCRKSYEDCASGIMEDSAIKCEYMLNAIPKRLCLVCGDIASGYHYGVASCEACKAEYSCP

SEQ ID NO: 22319 - protein, 70 aa, Synthetic construct
MFAGAGLGGTPCRKSYEDCASGIMEDSAIKCEYMLNAIPKRLCLVCGDIASGYHYGVASCEACKAFFKRT

SEQ ID NO: 22320 - protein, 70 aa, Synthetic construct
TTDPEVLATQLNSLPGLTYSPHVYSTPKHYIRFTSPFLSEKRRRKEPTENISGSCKKRWLKQALEEENSA

SEQ ID NO: 22321 - protein, 70 aa, Synthetic construct
DGLSERPLRILNSLPGLTYSPHVYSTPKHYIRFTSPFLSEKRRRKEPTENISGSCKKRWLKQALEEENSA

SEQ ID NO: 22322 - protein, 70 aa, Synthetic construct
DGLSERPLRITTDPEGLTYSPHVYSTPKHYIRFTSPFLSEKRRRKEPTENISGSCKKRWLKQALEEENSA

SEQ ID NO: 22323 - protein, 70 aa, Synthetic construct
DGLSERPLRITTDPEVLATQPHVYSTPKHYIRFTSPFLSEKRRRKEPTENISGSCKKRWLKQALEEENSA

SEQ ID NO: 22324 - protein, 70 aa, Synthetic construct
DGLSERPLRITTDPEVLATQLNSLPTPKHYIRFTSPFLSEKRRRKEPTENISGSCKKRWLKQALEEENSA

SEQ ID NO: 22325 - protein, 70 aa, Synthetic construct
DGLSERPLRITTDPEVLATQLNSLPGLTYSIRFTSPFLSEKRRRKEPTENISGSCKKRWLKQALEEENSA

SEQ ID NO: 22326 - protein, 70 aa, Synthetic construct
DGLSERPLRITTDPEVLATQLNSLPGLTYSPHVYSPFLSEKRRRKEPTENISGSCKKRWLKQALEEENSA

SEQ ID NO: 22327 - protein, 70 aa, Synthetic construct
DGLSERPLRITTDPEVLATQLNSLPGLTYSPHVYSTPKHYKRRRKEPTENISGSCKKRWLKQALEEENSA

SEQ ID NO: 22328 - protein, 70 aa, Synthetic construct
DGLSERPLRITTDPEVLATQLNSLPGLTYSPHVYSTPKHYIRFTSEPTENISGSCKKRWLKQALEEENSA

SEQ ID NO: 22329 - protein, 70 aa, Synthetic construct
DGLSERPLRITTDPEVLATQLNSLPGLTYSPHVYSTPKHYIRFTSPFLSEISGSCKKRWLKQALEEENSA

SEQ ID NO: 22330 - protein, 70 aa, Synthetic construct
ISGSCKKRWLKQALEEENSAILHRFNSPCQERSRSPAVNGENKSPLLLNDSCSLPDLTTPLKKRRFYQLL

SEQ ID NO: 22331 - protein, 70 aa, Synthetic construct
KRRRKEPTENISGSCKKRWLILHRFNSPCQERSRSPAVNGENKSPLLLNDSCSLPDLTTPLKKRRFYQLL

SEQ ID NO: 22332 - protein, 70 aa, Synthetic construct
KRRRKEPTENISGSCKKRWLKQALENSPCQERSRSPAVNGENKSPLLLNDSCSLPDLTTPLKKRRFYQLL

SEQ ID NO: 22333 - protein, 70 aa, Synthetic construct
KRRRKEPTENISGSCKKRWLKQALEEENSAERSRSPAVNGENKSPLLLNDSCSLPDLTTPLKKRRFYQLL

SEQ ID NO: 22334 - protein, 70 aa, Synthetic construct
KRRRKEPTENISGSCKKRWLKQALEEENSAILHRFPAVNGENKSPLLLNDSCSLPDLTTPLKKRRFYQLL

SEQ ID NO: 22335 - protein, 70 aa, Synthetic construct
KRRRKEPTENISGSCKKRWLKQALEEENSAILHRFNSPCQENKSPLLLNDSCSLPDLTTPLKKRRFYQLL

SEQ ID NO: 22336 - protein, 70 aa, Synthetic construct
KRRRKEPTENISGSCKKRWLKQALEEENSAILHRFNSPCQERSRSLLLNDSCSLPDLTTPLKKRRFYQLL

SEQ ID NO: 22337 - protein, 70 aa, Synthetic construct
KRRRKEPTENISGSCKKRWLKQALEEENSAILHRFNSPCQERSRSPAVNGSCSLPDLTTPLKKRRFYQLL

SEQ ID NO: 22338 - protein, 70 aa, Synthetic construct
KRRRKEPTENISGSCKKRWLKQALEEENSAILHRFNSPCQERSRSPAVNGENKSPDLTTPLKKRRFYQLL

SEQ ID NO: 22339 - protein, 70 aa, Synthetic construct
KRRRKEPTENISGSCKKRWLKQALEEENSAILHRFNSPCQERSRSPAVNGENKSPLLLNDLKKRRFYQLL

SEQ ID NO: 22340 - protein, 70 aa, Synthetic construct
KRRRKEPTENISGSCKKRWLKQALEEENSAILHRFNSPCQERSRSPAVNGENKSPLLLNDSCSLPFYQLL

SEQ ID NO: 22341 - protein, 70 aa, Synthetic construct
QGGEIILCDTCPRAYHLVCLKWSCPHCEKEGIQWEPKDDDDEEEEGGCEEEEDDHMEFCRVCKDGGELLC

SEQ ID NO: 22342 - protein, 70 aa, Synthetic construct
QGGEIILCDTCPRAYHLVCLDPELEKAPEGKWSCPHCEKEDEEEEGGCEEEEDDHMEFCRVCKDGGELLC

SEQ ID NO: 22343 - protein, 70 aa, Synthetic construct
QGGEIILCDTCPRAYHLVCLDPELEKAPEGKWSCPHCEKEGIQWEGGCEEEEDDHMEFCRVCKDGGELLC

SEQ ID NO: 22344 - protein, 70 aa, Synthetic construct
QGGEIILCDTCPRAYHLVCLDPELEKAPEGKWSCPHCEKEGIQWEPKDDDEEDDHMEFCRVCKDGGELLC

SEQ ID NO: 22345 - protein, 70 aa, Synthetic construct
QGGEIILCDTCPRAYHLVCLDPELEKAPEGKWSCPHCEKEGIQWEPKDDDDEEEEMEFCRVCKDGGELLC

SEQ ID NO: 22346 - protein, 70 aa, Synthetic construct
QGGEIILCDTCPRAYHLVCLDPELEKAPEGKWSCPHCEKEGIQWEPKDDDDEEEEGGCEEVCKDGGELLC

SEQ ID NO: 22347 - protein, 70 aa, Synthetic construct
QGGEIILCDTCPRAYHLVCLDPELEKAPEGKWSCPHCEKEGIQWEPKDDDDEEEEGGCEEEEDDHGELLC

SEQ ID NO: 22348 - protein, 70 aa, Synthetic construct
QGGEIILCDTCPRAYHLVCLDPELEKAPEGKWSCPHCEKEGIQWEPKDDDDEEEEGGCEEEEDDHMEFCR

SEQ ID NO: 22349 - protein, 70 aa, Synthetic construct
SITKHPSTWSVEAVVLFLKQTDPLALCPLVDLFRSLTSDVLLKHLGVKLGTAVKLCYYIDRLKQGKCFEN

SEQ ID NO: 22350 - protein, 70 aa, Synthetic construct
SITKHPSTWSVEAVVLFLKQTDPLALCPLVDLFRSHEIDGKALLLLTSDVLLKHLGVKLGRLKQGKCFEN

SEQ ID NO: 22351 - protein, 70 aa, Synthetic construct
SEPTKWNVEDVYEFIRSLPGCQEIAEEFRAQEIDGQALLLLKEDHLMSAMNIKLGPALKIYARISMLKDS

SEQ ID NO: 22352 - protein, 70 aa, Synthetic construct
LVGMGWNVEDVYEFIRSLPGCQEIAEEFRAQEIDGQALLLLKEDHLMSAMNIKLGPALKIYARISMLKDS

SEQ ID NO: 22353 - protein, 70 aa, Synthetic construct
SLHRTSSGTSLSAMHSSGSSGKGAGPLRGKTSGTEPADFALPSSRGGPGKLSPRKGVSQTGTPVCEEDGD

SEQ ID NO: 22354 - protein, 70 aa, Synthetic construct
DISSFSSGTSLSAMHSSGSSGKGAGPLRGKTSGTEPADFALPSSRGGPGKLSPRKGVSQTGTPVCEEDGD

SEQ ID NO: 22355 - protein, 70 aa, Synthetic construct
DISSFSSKASLSAMHSSGSSGKGAGPLRGKTSGTEPADFALPSSRGGPGKLSPRKGVSQTGTPVCEEDGD

SEQ ID NO: 22356 - protein, 70 aa, Synthetic construct
DISSFSSKASSLHRTSSGTSGKGAGPLRGKTSGTEPADFALPSSRGGPGKLSPRKGVSQTGTPVCEEDGD

SEQ ID NO: 22357 - protein, 70 aa, Synthetic construct
DISSFSSKASSLHRTSSGTSLSAMHPLRGKTSGTEPADFALPSSRGGPGKLSPRKGVSQTGTPVCEEDGD

SEQ ID NO: 22358 - protein, 70 aa, Synthetic construct
DISSFSSKASSLHRTSSGTSLSAMHSSGSSGKGAGPLRGKLPSSRGGPGKLSPRKGVSQTGTPVCEEDGD

SEQ ID NO: 22359 - protein, 70 aa, Synthetic construct
DISSFSSKASSLHRTSSGTSLSAMHSSGSSGKGAGPLRGKTSGTEPADFALPSSRGVSQTGTPVCEEDGD

SEQ ID NO: 22360 - protein, 70 aa, Synthetic construct
MPPLCPIGSHPKVQSPKPITGGLGAFTKVIIKQEPGEAPHVPATGAASQSPLPQYVTVKGGHMIAVSPQK

SEQ ID NO: 22361 - protein, 70 aa, Synthetic construct
VKQEDPIGSHPKVQSPKPITGGLGAFTKVIIKQEPGEAPHVPATGAASQSPLPQYVTVKGGHMIAVSPQK

SEQ ID NO: 22362 - protein, 70 aa, Synthetic construct
VKQEDSLFASPKVQSPKPITGGLGAFTKVIIKQEPGEAPHVPATGAASQSPLPQYVTVKGGHMIAVSPQK

SEQ ID NO: 22363 - protein, 70 aa, Synthetic construct
VKQEDSLFASMPPLCPKPITGGLGAFTKVIIKQEPGEAPHVPATGAASQSPLPQYVTVKGGHMIAVSPQK

SEQ ID NO: 22364 - protein, 70 aa, Synthetic construct
VKQEDSLFASMPPLCPIGSHGGLGAFTKVIIKQEPGEAPHVPATGAASQSPLPQYVTVKGGHMIAVSPQK

SEQ ID NO: 22365 - protein, 70 aa, Synthetic construct
VKQEDSLFASMPPLCPIGSHPKVQSFTKVIIKQEPGEAPHVPATGAASQSPLPQYVTVKGGHMIAVSPQK

SEQ ID NO: 22366 - protein, 70 aa, Synthetic construct
VKQEDSLFASMPPLCPIGSHPKVQSPKPITIKQEPGEAPHVPATGAASQSPLPQYVTVKGGHMIAVSPQK

SEQ ID NO: 22367 - protein, 70 aa, Synthetic construct
VKQEDSLFASMPPLCPIGSHPKVQSPKPITGGLGAFTKVIIKQEPAASQSPLPQYVTVKGGHMIAVSPQK

SEQ ID NO: 22368 - protein, 70 aa, Synthetic construct
VKQEDSLFASMPPLCPIGSHPKVQSPKPITGGLGAFTKVIIKQEPGEAPHPLPQYVTVKGGHMIAVSPQK

SEQ ID NO: 22369 - protein, 70 aa, Synthetic construct
VKQEDSLFASMPPLCPIGSHPKVQSPKPITGGLGAFTKVIIKQEPGEAPHVPATGVTVKGGHMIAVSPQK

SEQ ID NO: 22370 - protein, 70 aa, Synthetic construct
VKQEDSLFASMPPLCPIGSHPKVQSPKPITGGLGAFTKVIIKQEPGEAPHVPATGAASQSGHMIAVSPQK

SEQ ID NO: 22371 - protein, 70 aa, Synthetic construct
VKQEDSLFASMPPLCPIGSHPKVQSPKPITGGLGAFTKVIIKQEPGEAPHVPATGAASQSPLPQYVSPQK

SEQ ID NO: 22372 - protein, 70 aa, Synthetic construct
VKQEDSLFASMPPLCPIGSHPKVQSPKPITGGLGAFTKVIIKQEPGEAPHVPATGAASQSPLPQYVTVKG

SEQ ID NO: 22373 - protein, 70 aa, Synthetic construct
QQFQKREPENEEEVDILSLSEPVKINIKKEQEEKQEEVKFYLPPTPGSEFIGDVTQKIGITLQPVALHRN

SEQ ID NO: 22374 - protein, 70 aa, Synthetic construct
DNLCRREPENEEEVDILSLSEPVKINIKKEQEEKQEEVKFYLPPTPGSEFIGDVTQKIGITLQPVALHRN

SEQ ID NO: 22375 - protein, 70 aa, Synthetic construct
DNLCRKLEDLQQFQKILSLSEPVKINIKKEQEEKQEEVKFYLPPTPGSEFIGDVTQKIGITLQPVALHRN

SEQ ID NO: 22376 - protein, 70 aa, Synthetic construct
DNLCRKLEDLQQFQKREPENEEEVDNIKKEQEEKQEEVKFYLPPTPGSEFIGDVTQKIGITLQPVALHRN

SEQ ID NO: 22377 - protein, 70 aa, Synthetic construct
DNLCRKLEDLQQFQKREPENEEEVDILSLSEPVKINIKKEYLPPTPGSEFIGDVTQKIGITLQPVALHRN

SEQ ID NO: 22378 - protein, 70 aa, Synthetic construct
DNLCRKLEDLQQFQKREPENEEEVDILSLSEPVKINIKKEQEEKQPGSEFIGDVTQKIGITLQPVALHRN

SEQ ID NO: 22379 - protein, 70 aa, Synthetic construct
DNLCRKLEDLQQFQKREPENEEEVDILSLSEPVKINIKKEQEEKQEEVKFIGDVTQKIGITLQPVALHRN

SEQ ID NO: 22380 - protein, 70 aa, Synthetic construct
DNLCRKLEDLQQFQKREPENEEEVDILSLSEPVKINIKKEQEEKQEEVKFYLPPTQKIGITLQPVALHRN

SEQ ID NO: 22381 - protein, 70 aa, Synthetic construct
DNLCRKLEDLQQFQKREPENEEEVDILSLSEPVKINIKKEQEEKQEEVKFYLPPTPGSEFTLQPVALHRN

SEQ ID NO: 22382 - protein, 70 aa, Synthetic construct
DNLCRKLEDLQQFQKREPENEEEVDILSLSEPVKINIKKEQEEKQEEVKFYLPPTPGSEFIGDVTQKIGI

SEQ ID NO: 22383 - protein, 70 aa, Synthetic construct
QHKNIQLQNSHIHLVARGPEQTMDPKLSTIMEQQISSAAQDKIELQRHGTGISVIQHTNSLSRPNSFDKP

SEQ ID NO: 22384 - protein, 70 aa, Synthetic construct
KHNVTQLQNSHIHLVARGPEQTMDPKLSTIMEQQISSAAQDKIELQRHGTGISVIQHTNSLSRPNSFDKP

SEQ ID NO: 22385 - protein, 70 aa, Synthetic construct
KHNVTIRSDQHIHLVARGPEQTMDPKLSTIMEQQISSAAQDKIELQRHGTGISVIQHTNSLSRPNSFDKP

SEQ ID NO: 22386 - protein, 70 aa, Synthetic construct
KHNVTIRSDQQHKNIARGPEQTMDPKLSTIMEQQISSAAQDKIELQRHGTGISVIQHTNSLSRPNSFDKP

SEQ ID NO: 22387 - protein, 70 aa, Synthetic construct
KHNVTIRSDQQHKNIQLQNSQTMDPKLSTIMEQQISSAAQDKIELQRHGTGISVIQHTNSLSRPNSFDKP

SEQ ID NO: 22388 - protein, 70 aa, Synthetic construct
KHNVTIRSDQQHKNIQLQNSHIHLVKLSTIMEQQISSAAQDKIELQRHGTGISVIQHTNSLSRPNSFDKP

SEQ ID NO: 22389 - protein, 70 aa, Synthetic construct
KHNVTIRSDQQHKNIQLQNSHIHLVARGPEMEQQISSAAQDKIELQRHGTGISVIQHTNSLSRPNSFDKP

SEQ ID NO: 22390 - protein, 70 aa, Synthetic construct
KHNVTIRSDQQHKNIQLQNSHIHLVARGPEQTMDPSSAAQDKIELQRHGTGISVIQHTNSLSRPNSFDKP

SEQ ID NO: 22391 - protein, 70 aa, Synthetic construct
KHNVTIRSDQQHKNIQLQNSHIHLVARGPEQTMDPKLSTIDKIELQRHGTGISVIQHTNSLSRPNSFDKP

SEQ ID NO: 22392 - protein, 70 aa, Synthetic construct
KHNVTIRSDQQHKNIQLQNSHIHLVARGPEQTMDPKLSTIMEQQIQRHGTGISVIQHTNSLSRPNSFDKP

SEQ ID NO: 22393 - protein, 70 aa, Synthetic construct
KHNVTIRSDQQHKNIQLQNSHIHLVARGPEQTMDPKLSTIMEQQISSAAQGISVIQHTNSLSRPNSFDKP

SEQ ID NO: 22394 - protein, 70 aa, Synthetic construct
KHNVTIRSDQQHKNIQLQNSHIHLVARGPEQTMDPKLSTIMEQQISSAAQDKIELQRHGTGISVIQHTNS

SEQ ID NO: 22395 - protein, 70 aa, Synthetic construct
HDQEKSEKFSWPQRSETLSKLPTEKLPPKKKRLRLAEIEHSSTESSFDSTLSRSLSRESSLSHTSSFSAS

SEQ ID NO: 22396 - protein, 70 aa, Synthetic construct
KIIPTLPSDKLSKIQTLKLAARYIDFLYQVLQSDEMDNKMTSCSYVAHERLSYAFSVWRMEGAWSMSASH

SEQ ID NO: 22397 - protein, 70 aa, Synthetic construct
SLNEAFAALRKIIPTLPSDKLSKIQTLKLAARYIDFLYQVLQSDEVAHERLSYAFSVWRMEGAWSMSASH

SEQ ID NO: 22398 - protein, 70 aa, Synthetic construct
SLNEAFAALRKIIPTLPSDKLSKIQTLKLAARYIDFLYQVLQSDEMDNKMLSYAFSVWRMEGAWSMSASH

SEQ ID NO: 22399 - protein, 70 aa, Synthetic construct
SLNEAFAALRKIIPTLPSDKLSKIQTLKLAARYIDFLYQVLQSDEMDNKMTSCSYSVWRMEGAWSMSASH

SEQ ID NO: 22400 - protein, 70 aa, Synthetic construct
SLNEAFAALRKIIPTLPSDKLSKIQTLKLAARYIDFLYQVLQSDEMDNKMTSCSYVAHEREGAWSMSASH

SEQ ID NO: 22401 - protein, 70 aa, Synthetic construct
SLNEAFAALRKIIPTLPSDKLSKIQTLKLAARYIDFLYQVLQSDEMDNKMTSCSYVAHERLSYAFMSASH

SEQ ID NO: 22402 - protein, 70 aa, Synthetic construct
SLNEAFAALRKIIPTLPSDKLSKIQTLKLAARYIDFLYQVLQSDEMDNKMTSCSYVAHERLSYAFSVWRM

SEQ ID NO: 22403 - protein, 70 aa, Synthetic construct
ISHVNFRMFSCPKESDPIQALRKLTELCHLWLRPDLHTKEQILDMLVMEQFMISMNGVQSCKDLEDLLRN

SEQ ID NO: 22404 - protein, 70 aa, Synthetic construct
ISHVNFRMFSCPKESDPIQALRKLTELCHLWLRPDLHTKEQILDMLVMEQFMISMPQELQCKDLEDLLRN

SEQ ID NO: 22405 - protein, 70 aa, Synthetic construct
ISHVNFRMFSCPKESDPIQALRKLTELCHLWLRPDLHTKEQILDMLVMEQFMISMPQELQVLVMMDLLRN

SEQ ID NO: 22406 - protein, 70 aa, Synthetic construct
ISHVNFRMFSCPKESDPIQALRKLTELCHLWLRPDLHTKEQILDMLVMEQFMISMPQELQVLVMMNGVQS

SEQ ID NO: 22407 - protein, 70 aa, Synthetic construct
CKDLEDLLRNNRRPKKWSVVTFHGKEYIVQDSDIEMAEAPSSVRDDLKDVSSQRASSVNQMRPGEGQAHR

SEQ ID NO: 22408 - protein, 70 aa, Synthetic construct
VLVMMDLLRNNRRPKKWSVVTFHGKEYIVQDSDIEMAEAPSSVRDDLKDVSSQRASSVNQMRPGEGQAHR

SEQ ID NO: 22409 - protein, 70 aa, Synthetic construct
VLVMMNGVQSNRRPKKWSVVTFHGKEYIVQDSDIEMAEAPSSVRDDLKDVSSQRASSVNQMRPGEGQAHR

SEQ ID NO: 22410 - protein, 70 aa, Synthetic construct
VLVMMNGVQSCKDLEDLLRNNRRPKKWSVVTFHGKEYIVQSSVRDDLKDVSSQRASSVNQMRPGEGQAHR

SEQ ID NO: 22411 - protein, 70 aa, Synthetic construct
VLVMMNGVQSCKDLEDLLRNNRRPKKWSVVTFHGKEYIVQDSDIEDLKDVSSQRASSVNQMRPGEGQAHR

SEQ ID NO: 22412 - protein, 70 aa, Synthetic construct
VLVMMNGVQSCKDLEDLLRNNRRPKKWSVVTFHGKEYIVQDSDIEMAEAPSSQRASSVNQMRPGEGQAHR

SEQ ID NO: 22413 - protein, 70 aa, Synthetic construct
VLVMMNGVQSCKDLEDLLRNNRRPKKWSVVTFHGKEYIVQDSDIEMAEAPSSVRDSSVNQMRPGEGQAHR

SEQ ID NO: 22414 - protein, 70 aa, Synthetic construct
VLVMMNGVQSCKDLEDLLRNNRRPKKWSVVTFHGKEYIVQDSDIEMAEAPSSVRDDLKDVMRPGEGQAHR

SEQ ID NO: 22415 - protein, 70 aa, Synthetic construct
VLVMMNGVQSCKDLEDLLRNNRRPKKWSVVTFHGKEYIVQDSDIEMAEAPSSVRDDLKDVSSQRAGQAHR

SEQ ID NO: 22416 - protein, 70 aa, Synthetic construct
VLVMMNGVQSCKDLEDLLRNNRRPKKWSVVTFHGKEYIVQDSDIEMAEAPSSVRDDLKDVSSQRASSVNQ

SEQ ID NO: 22417 - protein, 70 aa, Synthetic construct
IKPEKAKMWKPGDECFALYWEDNKFYRAEVEALHSSGMTAVVKFIDYGNYEEVLLSNIKPIQTEAWEEEG

SEQ ID NO: 22418 - protein, 70 aa, Synthetic construct
IKPEKILESSPGDECFALYWEDNKFYRAEVEALHSSGMTAVVKFIDYGNYEEVLLSNIKPIQTEAWEEEG

SEQ ID NO: 22419 - protein, 70 aa, Synthetic construct
IKPEKILESSIPMEYAKMWKPGDECFALYWEALHSSGMTAVVKFIDYGNYEEVLLSNIKPIQTEAWEEEG

SEQ ID NO: 22420 - protein, 70 aa, Synthetic construct
IKPEKILESSIPMEYAKMWKPGDECFALYWEDNKFYRAEVEALHSDYGNYEEVLLSNIKPIQTEAWEEEG

SEQ ID NO: 22421 - protein, 70 aa, Synthetic construct
IKPEKILESSIPMEYAKMWKPGDECFALYWEDNKFYRAEVEALHSSGMTAEEVLLSNIKPIQTEAWEEEG

SEQ ID NO: 22422 - protein, 70 aa, Synthetic construct
IKPEKILESSIPMEYAKMWKPGDECFALYWEDNKFYRAEVEALHSSGMTAVVKFIDYGNYEEVLLSNIKP

SEQ ID NO: 22423 - protein, 70 aa, Synthetic construct
GSPLSLGQSQHDLSQSAFLSWLSQTQSHSSLLSSSVLTPDSSPGKLDPAPSQPPEEPEPDEAESSPDPQA

SEQ ID NO: 22424 - protein, 70 aa, Synthetic construct
QSHKGLGQSQHDLSQSAFLSWLSQTQSHSSLLSSSVLTPDSSPGKLDPAPSQPPEEPEPDEAESSPDPQA

SEQ ID NO: 22425 - protein, 70 aa, Synthetic construct
QSHKGFLEQEHDLSQSAFLSWLSQTQSHSSLLSSSVLTPDSSPGKLDPAPSQPPEEPEPDEAESSPDPQA

SEQ ID NO: 22426 - protein, 70 aa, Synthetic construct
QSHKGFLEQEGSPLSLGQSQHDLSQSAFLSWLSQTVLTPDSSPGKLDPAPSQPPEEPEPDEAESSPDPQA

SEQ ID NO: 22427 - protein, 70 aa, Synthetic construct
QSHKGFLEQEGSPLSLGQSQHDLSQSAFLSWLSQTQSHSSSSPGKLDPAPSQPPEEPEPDEAESSPDPQA

SEQ ID NO: 22428 - protein, 70 aa, Synthetic construct
QSHKGFLEQEGSPLSLGQSQHDLSQSAFLSWLSQTQSHSSLLSSSLDPAPSQPPEEPEPDEAESSPDPQA

SEQ ID NO: 22429 - protein, 70 aa, Synthetic construct
QSHKGFLEQEGSPLSLGQSQHDLSQSAFLSWLSQTQSHSSLLSSSVLTPDSQPPEEPEPDEAESSPDPQA

SEQ ID NO: 22430 - protein, 70 aa, Synthetic construct
QSHKGFLEQEGSPLSLGQSQHDLSQSAFLSWLSQTQSHSSLLSSSVLTPDSSPGKEPEPDEAESSPDPQA

SEQ ID NO: 22431 - protein, 70 aa, Synthetic construct
QSHKGFLEQEGSPLSLGQSQHDLSQSAFLSWLSQTQSHSSLLSSSVLTPDSSPGKLDPAPEAESSPDPQA

SEQ ID NO: 22432 - protein, 70 aa, Synthetic construct
QSHKGFLEQEGSPLSLGQSQHDLSQSAFLSWLSQTQSHSSLLSSSVLTPDSSPGKLDPAPSQPPEPDPQA

SEQ ID NO: 22433 - protein, 70 aa, Synthetic construct
QSHKGFLEQEGSPLSLGQSQHDLSQSAFLSWLSQTQSHSSLLSSSVLTPDSSPGKLDPAPSQPPEEPEPD

SEQ ID NO: 22434 - protein, 70 aa, Synthetic construct
LYSSFTINSLQNPPDAFKAIKTEKLEEPPEDSPPVEEVRTVIRFVTNKTDKHVTRPVVSLPSTSEAAAAS

SEQ ID NO: 22435 - protein, 70 aa, Synthetic construct
TSRNETINSLQNPPDAFKAIKTEKLEEPPEDSPPVEEVRTVIRFVTNKTDKHVTRPVVSLPSTSEAAAAS

SEQ ID NO: 22436 - protein, 70 aa, Synthetic construct
TSRNEYIHSGQNPPDAFKAIKTEKLEEPPEDSPPVEEVRTVIRFVTNKTDKHVTRPVVSLPSTSEAAAAS

SEQ ID NO: 22437 - protein, 70 aa, Synthetic construct
TSRNEYIHSGLYSSFAFKAIKTEKLEEPPEDSPPVEEVRTVIRFVTNKTDKHVTRPVVSLPSTSEAAAAS

SEQ ID NO: 22438 - protein, 70 aa, Synthetic construct
TSRNEYIHSGLYSSFTINSLKTEKLEEPPEDSPPVEEVRTVIRFVTNKTDKHVTRPVVSLPSTSEAAAAS

SEQ ID NO: 22439 - protein, 70 aa, Synthetic construct
TSRNEYIHSGLYSSFTINSLQNPPDEEPPEDSPPVEEVRTVIRFVTNKTDKHVTRPVVSLPSTSEAAAAS

SEQ ID NO: 22440 - protein, 70 aa, Synthetic construct
TSRNEYIHSGLYSSFTINSLQNPPDAFKAIDSPPVEEVRTVIRFVTNKTDKHVTRPVVSLPSTSEAAAAS

SEQ ID NO: 22441 - protein, 70 aa, Synthetic construct
TSRNEYIHSGLYSSFTINSLQNPPDAFKAIKTEKLEEVRTVIRFVTNKTDKHVTRPVVSLPSTSEAAAAS

SEQ ID NO: 22442 - protein, 70 aa, Synthetic construct
TSRNEYIHSGLYSSFTINSLQNPPDAFKAIKTEKLEEPPEVIRFVTNKTDKHVTRPVVSLPSTSEAAAAS

SEQ ID NO: 22443 - protein, 70 aa, Synthetic construct
TSRNEYIHSGLYSSFTINSLQNPPDAFKAIKTEKLEEPPEDSPPVTNKTDKHVTRPVVSLPSTSEAAAAS

SEQ ID NO: 22444 - protein, 70 aa, Synthetic construct
TSRNEYIHSGLYSSFTINSLQNPPDAFKAIKTEKLEEPPEDSPPVEEVRTKHVTRPVVSLPSTSEAAAAS

SEQ ID NO: 22445 - protein, 70 aa, Synthetic construct
TSRNEYIHSGLYSSFTINSLQNPPDAFKAIKTEKLEEPPEDSPPVEEVRTVIRFVPVVSLPSTSEAAAAS

SEQ ID NO: 22446 - protein, 70 aa, Synthetic construct
TSRNEYIHSGLYSSFTINSLQNPPDAFKAIKTEKLEEPPEDSPPVEEVRTVIRFVTNKTDPSTSEAAAAS

SEQ ID NO: 22447 - protein, 70 aa, Synthetic construct
TSRNEYIHSGLYSSFTINSLQNPPDAFKAIKTEKLEEPPEDSPPVEEVRTVIRFVTNKTDKHVTRAAAAS

SEQ ID NO: 22448 - protein, 70 aa, Synthetic construct
TSRNEYIHSGLYSSFTINSLQNPPDAFKAIKTEKLEEPPEDSPPVEEVRTVIRFVTNKTDKHVTRPVVSL

SEQ ID NO: 22449 - protein, 70 aa, Synthetic construct
FDLTGQTRRLKMDAVPTIFDFCTHIKSMKLKSRNLLKKNNSCSPAGPSNLKSNISSQQVLLEHSYAFRNP

SEQ ID NO: 22450 - protein, 70 aa, Synthetic construct
LCSKHQTRRLKMDAVPTIFDFCTHIKSMKLKSRNLLKKNNSCSPAGPSNLKSNISSQQVLLEHSYAFRNP

SEQ ID NO: 22451 - protein, 70 aa, Synthetic construct
LCSKHFEASCKMDAVPTIFDFCTHIKSMKLKSRNLLKKNNSCSPAGPSNLKSNISSQQVLLEHSYAFRNP

SEQ ID NO: 22452 - protein, 70 aa, Synthetic construct
LCSKHFEASCFDLTGPTIFDFCTHIKSMKLKSRNLLKKNNSCSPAGPSNLKSNISSQQVLLEHSYAFRNP

SEQ ID NO: 22453 - protein, 70 aa, Synthetic construct
LCSKHFEASCFDLTGQTRRLKMDAVPTIFDKSRNLLKKNNSCSPAGPSNLKSNISSQQVLLEHSYAFRNP

SEQ ID NO: 22454 - protein, 70 aa, Synthetic construct
LCSKHFEASCFDLTGQTRRLKMDAVPTIFDFCTHILKKNNSCSPAGPSNLKSNISSQQVLLEHSYAFRNP

SEQ ID NO: 22455 - protein, 70 aa, Synthetic construct
LCSKHFEASCFDLTGQTRRLKMDAVPTIFDFCTHIKSMKLSCSPAGPSNLKSNISSQQVLLEHSYAFRNP

SEQ ID NO: 22456 - protein, 70 aa, Synthetic construct
LCSKHFEASCFDLTGQTRRLKMDAVPTIFDFCTHIKSMKLKSRNLGPSNLKSNISSQQVLLEHSYAFRNP

SEQ ID NO: 22457 - protein, 70 aa, Synthetic construct
LCSKHFEASCFDLTGQTRRLKMDAVPTIFDFCTHIKSMKLKSRNLLKKNNKSNISSQQVLLEHSYAFRNP

SEQ ID NO: 22458 - protein, 70 aa, Synthetic construct
LCSKHFEASCFDLTGQTRRLKMDAVPTIFDFCTHIKSMKLKSRNLLKKNNSCSPASQQVLLEHSYAFRNP

SEQ ID NO: 22459 - protein, 70 aa, Synthetic construct
IKVEVEVEVKEEENEIREDEEPPRKRGRRRKDDKSPRLPKRRKKPPIQYVRCEMEGCGTVLAHPRYLQHH

SEQ ID NO: 22460 - protein, 70 aa, Synthetic construct
KVKEEEVEVKEEENEIREDEEPPRKRGRRRKDDKSPRLPKRRKKPPIQYVRCEMEGCGTVLAHPRYLQHH

SEQ ID NO: 22461 - protein, 70 aa, Synthetic construct
KVKEEKEKKEIKVEVIREDEEPPRKRGRRRKDDKSPRLPKRRKKPPIQYVRCEMEGCGTVLAHPRYLQHH

SEQ ID NO: 22462 - protein, 70 aa, Synthetic construct
KVKEEKEKKEIKVEVEVEVKEEENERGRRRKDDKSPRLPKRRKKPPIQYVRCEMEGCGTVLAHPRYLQHH

SEQ ID NO: 22463 - protein, 70 aa, Synthetic construct
KVKEEKEKKEIKVEVEVEVKEEENEIREDEKDDKSPRLPKRRKKPPIQYVRCEMEGCGTVLAHPRYLQHH

SEQ ID NO: 22464 - protein, 70 aa, Synthetic construct
KVKEEKEKKEIKVEVEVEVKEEENEIREDEEPPRKPRLPKRRKKPPIQYVRCEMEGCGTVLAHPRYLQHH

SEQ ID NO: 22465 - protein, 70 aa, Synthetic construct
KVKEEKEKKEIKVEVEVEVKEEENEIREDEEPPRKRGRRRRRKKPPIQYVRCEMEGCGTVLAHPRYLQHH

SEQ ID NO: 22466 - protein, 70 aa, Synthetic construct
KVKEEKEKKEIKVEVEVEVKEEENEIREDEEPPRKRGRRRKDDKSPIQYVRCEMEGCGTVLAHPRYLQHH

SEQ ID NO: 22467 - protein, 70 aa, Synthetic construct
KVKEEKEKKEIKVEVEVEVKEEENEIREDEEPPRKRGRRRKDDKSPRLPKRCEMEGCGTVLAHPRYLQHH

SEQ ID NO: 22468 - protein, 70 aa, Synthetic construct
KVKEEKEKKEIKVEVEVEVKEEENEIREDEEPPRKRGRRRKDDKSPRLPKRRKKPGCGTVLAHPRYLQHH

SEQ ID NO: 22469 - protein, 70 aa, Synthetic construct
KVKEEKEKKEIKVEVEVEVKEEENEIREDEEPPRKRGRRRKDDKSPRLPKRRKKPPIQYVLAHPRYLQHH

SEQ ID NO: 22470 - protein, 70 aa, Synthetic construct
KVKEEKEKKEIKVEVEVEVKEEENEIREDEEPPRKRGRRRKDDKSPRLPKRRKKPPIQYVRCEMEYLQHH

SEQ ID NO: 22471 - protein, 70 aa, Synthetic construct
KVKEEKEKKEIKVEVEVEVKEEENEIREDEEPPRKRGRRRKDDKSPRLPKRRKKPPIQYVRCEMEGCGTV

SEQ ID NO: 22472 - protein, 70 aa, Synthetic construct
RCEMEGCGTVLAHPRYLQHHIKYQHLLKKKYVCPHPSCGRLFRLQKQLLRHAKHHTDQRDYICEYCARAF

SEQ ID NO: 22473 - protein, 70 aa, Synthetic construct
RRKKPGCGTVLAHPRYLQHHIKYQHLLKKKYVCPHPSCGRLFRLQKQLLRHAKHHTDQRDYICEYCARAF

SEQ ID NO: 22474 - protein, 70 aa, Synthetic construct
RRKKPPIQYVLAHPRYLQHHIKYQHLLKKKYVCPHPSCGRLFRLQKQLLRHAKHHTDQRDYICEYCARAF

SEQ ID NO: 22475 - protein, 70 aa, Synthetic construct
RRKKPPIQYVRCEMEYLQHHIKYQHLLKKKYVCPHPSCGRLFRLQKQLLRHAKHHTDQRDYICEYCARAF

SEQ ID NO: 22476 - protein, 70 aa, Synthetic construct
RRKKPPIQYVRCEMEGCGTVIKYQHLLKKKYVCPHPSCGRLFRLQKQLLRHAKHHTDQRDYICEYCARAF

SEQ ID NO: 22477 - protein, 70 aa, Synthetic construct
RRKKPPIQYVRCEMEGCGTVLAHPRLLKKKYVCPHPSCGRLFRLQKQLLRHAKHHTDQRDYICEYCARAF

SEQ ID NO: 22478 - protein, 70 aa, Synthetic construct
RRKKPPIQYVRCEMEGCGTVLAHPRYLQHHYVCPHPSCGRLFRLQKQLLRHAKHHTDQRDYICEYCARAF

SEQ ID NO: 22479 - protein, 70 aa, Synthetic construct
RRKKPPIQYVRCEMEGCGTVLAHPRYLQHHIKYQHPSCGRLFRLQKQLLRHAKHHTDQRDYICEYCARAF

SEQ ID NO: 22480 - protein, 70 aa, Synthetic construct
RRKKPPIQYVRCEMEGCGTVLAHPRYLQHHIKYQHLLKKKLFRLQKQLLRHAKHHTDQRDYICEYCARAF

SEQ ID NO: 22481 - protein, 70 aa, Synthetic construct
RRKKPPIQYVRCEMEGCGTVLAHPRYLQHHIKYQHLLKKKYVCPHPSCGRHAKHHTDQRDYICEYCARAF

SEQ ID NO: 22482 - protein, 70 aa, Synthetic construct
RRKKPPIQYVRCEMEGCGTVLAHPRYLQHHIKYQHLLKKKYVCPHPSCGRLFRLQTDQRDYICEYCARAF

SEQ ID NO: 22483 - protein, 70 aa, Synthetic construct
LCDECNKAFHLFCLRPALYEVPDGEWQCPACQPATARRNSRGRNYTEESASEDSEDDESDEEEEEEEEEE

SEQ ID NO: 22484 - protein, 70 aa, Synthetic construct
RKKGEDDKLILFCLRPALYEVPDGEWQCPACQPATARRNSRGRNYTEESASEDSEDDESDEEEEEEEEEE

SEQ ID NO: 22485 - protein, 70 aa, Synthetic construct
RKKGEDDKLILCDECNKAFHVPDGEWQCPACQPATARRNSRGRNYTEESASEDSEDDESDEEEEEEEEEE

SEQ ID NO: 22486 - protein, 70 aa, Synthetic construct
RKKGEDDKLILCDECNKAFHLFCLRWQCPACQPATARRNSRGRNYTEESASEDSEDDESDEEEEEEEEEE

SEQ ID NO: 22487 - protein, 70 aa, Synthetic construct
RKKGEDDKLILCDECNKAFHLFCLRPALYECQPATARRNSRGRNYTEESASEDSEDDESDEEEEEEEEEE

SEQ ID NO: 22488 - protein, 70 aa, Synthetic construct
RKKGEDDKLILCDECNKAFHLFCLRPALYEVPDGEARRNSRGRNYTEESASEDSEDDESDEEEEEEEEEE

SEQ ID NO: 22489 - protein, 70 aa, Synthetic construct
RKKGEDDKLILCDECNKAFHLFCLRPALYEVPDGEWQCPARGRNYTEESASEDSEDDESDEEEEEEEEEE

SEQ ID NO: 22490 - protein, 70 aa, Synthetic construct
RKKGEDDKLILCDECNKAFHLFCLRPALYEVPDGEWQCPACQPATTEESASEDSEDDESDEEEEEEEEEE

SEQ ID NO: 22491 - protein, 70 aa, Synthetic construct
RKKGEDDKLILCDECNKAFHLFCLRPALYEVPDGEWQCPACQPATARRNSSEDSEDDESDEEEEEEEEEE

SEQ ID NO: 22492 - protein, 70 aa, Synthetic construct
RKKGEDDKLILCDECNKAFHLFCLRPALYEVPDGEWQCPACQPATARRNSRGRNYDDESDEEEEEEEEEE

SEQ ID NO: 22493 - protein, 70 aa, Synthetic construct
RKKGEDDKLILCDECNKAFHLFCLRPALYEVPDGEWQCPACQPATARRNSRGRNYTEESAEEEEEEEEEE

SEQ ID NO: 22494 - protein, 70 aa, Synthetic construct
RKKGEDDKLILCDECNKAFHLFCLRPALYEVPDGEWQCPACQPATARRNSRGRNYTEESASEDSEEEEEE

SEQ ID NO: 22495 - protein, 70 aa, Synthetic construct
RKKGEDDKLILCDECNKAFHLFCLRPALYEVPDGEWQCPACQPATARRNSRGRNYTEESASEDSEDDESD

SEQ ID NO: 22496 - protein, 70 aa, Synthetic construct
DVPAVSVIVKNTSRQESFEAEKDHITPSLLHNGFRGSDLPPDPHNCGKFDSTFMNGDSARSFPGKLEPPK

SEQ ID NO: 22497 - protein, 70 aa, Synthetic construct
VSLSHSGSAPDVPAVSVIVKNTSRQTPSLLHNGFRGSDLPPDPHNCGKFDSTFMNGDSARSFPGKLEPPK

SEQ ID NO: 22498 - protein, 70 aa, Synthetic construct
VSLSHSGSAPDVPAVSVIVKNTSRQESFEAHNGFRGSDLPPDPHNCGKFDSTFMNGDSARSFPGKLEPPK

SEQ ID NO: 22499 - protein, 70 aa, Synthetic construct
VSLSHSGSAPDVPAVSVIVKNTSRQESFEAEKDHIGSDLPPDPHNCGKFDSTFMNGDSARSFPGKLEPPK

SEQ ID NO: 22500 - protein, 70 aa, Synthetic construct
VSLSHSGSAPDVPAVSVIVKNTSRQESFEAEKDHITPSLLHNGFRCGKFDSTFMNGDSARSFPGKLEPPK

SEQ ID NO: 22501 - protein, 70 aa, Synthetic construct
VSLSHSGSAPDVPAVSVIVKNTSRQESFEAEKDHITPSLLHNGFRGSDLPSTFMNGDSARSFPGKLEPPK

SEQ ID NO: 22502 - protein, 70 aa, Synthetic construct
VSLSHSGSAPDVPAVSVIVKNTSRQESFEAEKDHITPSLLHNGFRGSDLPPDPHNGDSARSFPGKLEPPK

SEQ ID NO: 22503 - protein, 70 aa, Synthetic construct
VSLSHSGSAPDVPAVSVIVKNTSRQESFEAEKDHITPSLLHNGFRGSDLPPDPHNCGKFDSFPGKLEPPK

SEQ ID NO: 22504 - protein, 70 aa, Synthetic construct
VSLSHSGSAPDVPAVSVIVKNTSRQESFEAEKDHITPSLLHNGFRGSDLPPDPHNCGKFDSTFMNLEPPK

SEQ ID NO: 22505 - protein, 70 aa, Synthetic construct
VSLSHSGSAPDVPAVSVIVKNTSRQESFEAEKDHITPSLLHNGFRGSDLPPDPHNCGKFDSTFMNGDSAR

SEQ ID NO: 22506 - protein, 70 aa, Synthetic construct
PELHMFDHFCKKEPKPEPLPLGSQQEHEQSGQNTVEPHKDPDATRFFGEALEFNSHPSNSIGESKGLARE

SEQ ID NO: 22507 - protein, 70 aa, Synthetic construct
VLEALFDHFCKKEPKPEPLPLGSQQEHEQSGQNTVEPHKDPDATRFFGEALEFNSHPSNSIGESKGLARE

SEQ ID NO: 22508 - protein, 70 aa, Synthetic construct
VLEALAKFPVKKEPKPEPLPLGSQQEHEQSGQNTVEPHKDPDATRFFGEALEFNSHPSNSIGESKGLARE

SEQ ID NO: 22509 - protein, 70 aa, Synthetic construct
VLEALAKFPVPELHMFDHFCKKEPKEHEQSGQNTVEPHKDPDATRFFGEALEFNSHPSNSIGESKGLARE

SEQ ID NO: 22510 - protein, 70 aa, Synthetic construct
VLEALAKFPVPELHMFDHFCKKEPKPEPLPGQNTVEPHKDPDATRFFGEALEFNSHPSNSIGESKGLARE

SEQ ID NO: 22511 - protein, 70 aa, Synthetic construct
VLEALAKFPVPELHMFDHFCKKEPKPEPLPLGSQQEPHKDPDATRFFGEALEFNSHPSNSIGESKGLARE

SEQ ID NO: 22512 - protein, 70 aa, Synthetic construct
VLEALAKFPVPELHMFDHFCKKEPKPEPLPLGSQQEHEQSPDATRFFGEALEFNSHPSNSIGESKGLARE

SEQ ID NO: 22513 - protein, 70 aa, Synthetic construct
VLEALAKFPVPELHMFDHFCKKEPKPEPLPLGSQQEHEQSGQNTVFFGEALEFNSHPSNSIGESKGLARE

SEQ ID NO: 22514 - protein, 70 aa, Synthetic construct
VLEALAKFPVPELHMFDHFCKKEPKPEPLPLGSQQEHEQSGQNTVEPHKDLEFNSHPSNSIGESKGLARE

SEQ ID NO: 22515 - protein, 70 aa, Synthetic construct
VLEALAKFPVPELHMFDHFCKKEPKPEPLPLGSQQEHEQSGQNTVEPHKDPDATRHPSNSIGESKGLARE

SEQ ID NO: 22516 - protein, 70 aa, Synthetic construct
VLEALAKFPVPELHMFDHFCKKEPKPEPLPLGSQQEHEQSGQNTVEPHKDPDATRFFGEAIGESKGLARE

SEQ ID NO: 22517 - protein, 70 aa, Synthetic construct
VLEALAKFPVPELHMFDHFCKKEPKPEPLPLGSQQEHEQSGQNTVEPHKDPDATRFFGEALEFNSGLARE

SEQ ID NO: 22518 - protein, 70 aa, Synthetic construct
VLEALAKFPVPELHMFDHFCKKEPKPEPLPLGSQQEHEQSGQNTVEPHKDPDATRFFGEALEFNSHPSNS

SEQ ID NO: 22519 - protein, 70 aa, Synthetic construct
ATVSSTKRHKSLFQCAKCSFATDSGLEFQSHIPQHQVDSSTAQCLLCGLCYTSASSLSRHLFIVHKVRDQ

SEQ ID NO: 22520 - protein, 70 aa, Synthetic construct
VGDAPTKRHKSLFQCAKCSFATDSGLEFQSHIPQHQVDSSTAQCLLCGLCYTSASSLSRHLFIVHKVRDQ

SEQ ID NO: 22521 - protein, 70 aa, Synthetic construct
VGDAPGTSNGSLFQCAKCSFATDSGLEFQSHIPQHQVDSSTAQCLLCGLCYTSASSLSRHLFIVHKVRDQ

SEQ ID NO: 22522 - protein, 70 aa, Synthetic construct
VGDAPGTSNGATVSSAKCSFATDSGLEFQSHIPQHQVDSSTAQCLLCGLCYTSASSLSRHLFIVHKVRDQ

SEQ ID NO: 22523 - protein, 70 aa, Synthetic construct
VGDAPGTSNGATVSSTKRHKATDSGLEFQSHIPQHQVDSSTAQCLLCGLCYTSASSLSRHLFIVHKVRDQ

SEQ ID NO: 22524 - protein, 70 aa, Synthetic construct
VGDAPGTSNGATVSSTKRHKSLFQCLEFQSHIPQHQVDSSTAQCLLCGLCYTSASSLSRHLFIVHKVRDQ

SEQ ID NO: 22525 - protein, 70 aa, Synthetic construct
VRVNVKREYDHMNGSRESPVDCSVSKCSKLVGGGESNPMNYNSYMDEKNGPPPPNMTTNERRVIVPADPT

SEQ ID NO: 22526 - protein, 70 aa, Synthetic construct
PPQQEWINQPVRVNVKREYDDCSVSKCSKLVGGGESNPMNYNSYMDEKNGPPPPNMTTNERRVIVPADPT

SEQ ID NO: 22527 - protein, 70 aa, Synthetic construct
PPQQEWINQPVRVNVKREYDHMNGSKCSKLVGGGESNPMNYNSYMDEKNGPPPPNMTTNERRVIVPADPT

SEQ ID NO: 22528 - protein, 70 aa, Synthetic construct
PPQQEWINQPVRVNVKREYDHMNGSRESPVVGGGESNPMNYNSYMDEKNGPPPPNMTTNERRVIVPADPT

SEQ ID NO: 22529 - protein, 70 aa, Synthetic construct
PPQQEWINQPVRVNVKREYDHMNGSRESPVDCSVSSNPMNYNSYMDEKNGPPPPNMTTNERRVIVPADPT

SEQ ID NO: 22530 - protein, 70 aa, Synthetic construct
PPQQEWINQPVRVNVKREYDHMNGSRESPVDCSVSKCSKLYNSYMDEKNGPPPPNMTTNERRVIVPADPT

SEQ ID NO: 22531 - protein, 70 aa, Synthetic construct
PPQQEWINQPVRVNVKREYDHMNGSRESPVDCSVSKCSKLVGGGEDEKNGPPPPNMTTNERRVIVPADPT

SEQ ID NO: 22532 - protein, 70 aa, Synthetic construct
PPQQEWINQPVRVNVKREYDHMNGSRESPVDCSVSKCSKLVGGGESNPMNPPPPNMTTNERRVIVPADPT

SEQ ID NO: 22533 - protein, 70 aa, Synthetic construct
PPQQEWINQPVRVNVKREYDHMNGSRESPVDCSVSKCSKLVGGGESNPMNYNSYMMTTNERRVIVPADPT

SEQ ID NO: 22534 - protein, 70 aa, Synthetic construct
PPQQEWINQPVRVNVKREYDHMNGSRESPVDCSVSKCSKLVGGGESNPMNYNSYMDEKNGRRVIVPADPT

SEQ ID NO: 22535 - protein, 70 aa, Synthetic construct
PPQQEWINQPVRVNVKREYDHMNGSRESPVDCSVSKCSKLVGGGESNPMNYNSYMDEKNGPPPPNPADPT

SEQ ID NO: 22536 - protein, 70 aa, Synthetic construct
PPQQEWINQPVRVNVKREYDHMNGSRESPVDCSVSKCSKLVGGGESNPMNYNSYMDEKNGPPPPNMTTNE

SEQ ID NO: 22537 - protein, 70 aa, Synthetic construct
GNLGKSFLIENLLRVGGAPTPRLQPPAPHDPATALATAGAQLRPLPASPVPLKLCPAAEQVSPAGAPYGT

SEQ ID NO: 22538 - protein, 70 aa, Synthetic construct
LLNLPAAPGFGNLGKSFLIENLLRVPAPHDPATALATAGAQLRPLPASPVPLKLCPAAEQVSPAGAPYGT

SEQ ID NO: 22539 - protein, 70 aa, Synthetic construct
LLNLPAAPGFGNLGKSFLIENLLRVGGAPTPATALATAGAQLRPLPASPVPLKLCPAAEQVSPAGAPYGT

SEQ ID NO: 22540 - protein, 70 aa, Synthetic construct
LLNLPAAPGFGNLGKSFLIENLLRVGGAPTPRLQPATAGAQLRPLPASPVPLKLCPAAEQVSPAGAPYGT

SEQ ID NO: 22541 - protein, 70 aa, Synthetic construct
LLNLPAAPGFGNLGKSFLIENLLRVGGAPTPRLQPPAPHDQLRPLPASPVPLKLCPAAEQVSPAGAPYGT

SEQ ID NO: 22542 - protein, 70 aa, Synthetic construct
LLNLPAAPGFGNLGKSFLIENLLRVGGAPTPRLQPPAPHDPATALPASPVPLKLCPAAEQVSPAGAPYGT

SEQ ID NO: 22543 - protein, 70 aa, Synthetic construct
LLNLPAAPGFGNLGKSFLIENLLRVGGAPTPRLQPPAPHDPATALATAGAPLKLCPAAEQVSPAGAPYGT

SEQ ID NO: 22544 - protein, 70 aa, Synthetic construct
LLNLPAAPGFGNLGKSFLIENLLRVGGAPTPRLQPPAPHDPATALATAGAQLRPLPAAEQVSPAGAPYGT

SEQ ID NO: 22545 - protein, 70 aa, Synthetic construct
LLNLPAAPGFGNLGKSFLIENLLRVGGAPTPRLQPPAPHDPATALATAGAQLRPLPASPVVSPAGAPYGT

SEQ ID NO: 22546 - protein, 70 aa, Synthetic construct
LLNLPAAPGFGNLGKSFLIENLLRVGGAPTPRLQPPAPHDPATALATAGAQLRPLPASPVPLKLCAPYGT

SEQ ID NO: 22547 - protein, 70 aa, Synthetic construct
LLNLPAAPGFGNLGKSFLIENLLRVGGAPTPRLQPPAPHDPATALATAGAQLRPLPASPVPLKLCPAAEQ

SEQ ID NO: 22548 - protein, 70 aa, Synthetic construct
MEPQSPGEVKKLQKGSSESPFDLTTKRKDEKPLTPVPSKPPVTPATSQDQPLDLSMGSRSRASGTKLTEP

SEQ ID NO: 22549 - protein, 70 aa, Synthetic construct
DRDLRSLPLKMEPQSSSESPFDLTTKRKDEKPLTPVPSKPPVTPATSQDQPLDLSMGSRSRASGTKLTEP

SEQ ID NO: 22550 - protein, 70 aa, Synthetic construct
DRDLRSLPLKMEPQSPGEVKFDLTTKRKDEKPLTPVPSKPPVTPATSQDQPLDLSMGSRSRASGTKLTEP

SEQ ID NO: 22551 - protein, 70 aa, Synthetic construct
DRDLRSLPLKMEPQSPGEVKKLQKGKRKDEKPLTPVPSKPPVTPATSQDQPLDLSMGSRSRASGTKLTEP

SEQ ID NO: 22552 - protein, 70 aa, Synthetic construct
DRDLRSLPLKMEPQSPGEVKKLQKGSSESPKPLTPVPSKPPVTPATSQDQPLDLSMGSRSRASGTKLTEP

SEQ ID NO: 22553 - protein, 70 aa, Synthetic construct
DRDLRSLPLKMEPQSPGEVKKLQKGSSESPFDLTTVPSKPPVTPATSQDQPLDLSMGSRSRASGTKLTEP

SEQ ID NO: 22554 - protein, 70 aa, Synthetic construct
DRDLRSLPLKMEPQSPGEVKKLQKGSSESPFDLTTKRKDEPVTPATSQDQPLDLSMGSRSRASGTKLTEP

SEQ ID NO: 22555 - protein, 70 aa, Synthetic construct
DRDLRSLPLKMEPQSPGEVKKLQKGSSESPFDLTTKRKDEKPLTPTSQDQPLDLSMGSRSRASGTKLTEP

SEQ ID NO: 22556 - protein, 70 aa, Synthetic construct
DRDLRSLPLKMEPQSPGEVKKLQKGSSESPFDLTTKRKDEKPLTPVPSKPPLDLSMGSRSRASGTKLTEP

SEQ ID NO: 22557 - protein, 70 aa, Synthetic construct
DRDLRSLPLKMEPQSPGEVKKLQKGSSESPFDLTTKRKDEKPLTPVPSKPPVTPAMGSRSRASGTKLTEP

SEQ ID NO: 22558 - protein, 70 aa, Synthetic construct
DRDLRSLPLKMEPQSPGEVKKLQKGSSESPFDLTTKRKDEKPLTPVPSKPPVTPATSQDQRASGTKLTEP

SEQ ID NO: 22559 - protein, 70 aa, Synthetic construct
DRDLRSLPLKMEPQSPGEVKKLQKGSSESPFDLTTKRKDEKPLTPVPSKPPVTPATSQDQPLDLSKLTEP

SEQ ID NO: 22560 - protein, 70 aa, Synthetic construct
DRDLRSLPLKMEPQSPGEVKKLQKGSSESPFDLTTKRKDEKPLTPVPSKPPVTPATSQDQPLDLSMGSRS

SEQ ID NO: 22561 - protein, 70 aa, Synthetic construct
PVTPATSQDQPLDLSMGSRSRKNHVFGGKKGSNVESRPASDGSLQHARPTPFFMDPIYRVEKRKLTDPLE

SEQ ID NO: 22562 - protein, 70 aa, Synthetic construct
PVTPATSQDQPLDLSMGSRSRASGTFGGKKGSNVESRPASDGSLQHARPTPFFMDPIYRVEKRKLTDPLE

SEQ ID NO: 22563 - protein, 70 aa, Synthetic construct
PVTPATSQDQPLDLSMGSRSRASGTKLTEPGSNVESRPASDGSLQHARPTPFFMDPIYRVEKRKLTDPLE

SEQ ID NO: 22564 - protein, 70 aa, Synthetic construct
PVTPATSQDQPLDLSMGSRSRASGTKLTEPRKNHVSRPASDGSLQHARPTPFFMDPIYRVEKRKLTDPLE

SEQ ID NO: 22565 - protein, 70 aa, Synthetic construct
PVTPATSQDQPLDLSMGSRSRASGTKLTEPRKNHVFGGKKDGSLQHARPTPFFMDPIYRVEKRKLTDPLE

SEQ ID NO: 22566 - protein, 70 aa, Synthetic construct
PVTPATSQDQPLDLSMGSRSRASGTKLTEPRKNHVFGGKKGSNVEHARPTPFFMDPIYRVEKRKLTDPLE

SEQ ID NO: 22567 - protein, 70 aa, Synthetic construct
PVTPATSQDQPLDLSMGSRSRASGTKLTEPRKNHVFGGKKGSNVESRPASPFFMDPIYRVEKRKLTDPLE

SEQ ID NO: 22568 - protein, 70 aa, Synthetic construct
PVTPATSQDQPLDLSMGSRSRASGTKLTEPRKNHVFGGKKGSNVESRPASDGSLQHARPTPFFMDPIYRV

SEQ ID NO: 22569 - protein, 70 aa, Synthetic construct
KKPGKRGRKPAKIDLKAKLERSRQSARECRARKKLRYQYLEELVSSRERAICALREELEMYKQWCMAMDQ

SEQ ID NO: 22570 - protein, 70 aa, Synthetic construct
DDSKVRGRKPAKIDLKAKLERSRQSARECRARKKLRYQYLEELVSSRERAICALREELEMYKQWCMAMDQ

SEQ ID NO: 22571 - protein, 70 aa, Synthetic construct
DDSKVVGGKVAKIDLKAKLERSRQSARECRARKKLRYQYLEELVSSRERAICALREELEMYKQWCMAMDQ

SEQ ID NO: 22572 - protein, 70 aa, Synthetic construct
DDSKVVGGKVKKPGKKAKLERSRQSARECRARKKLRYQYLEELVSSRERAICALREELEMYKQWCMAMDQ

SEQ ID NO: 22573 - protein, 70 aa, Synthetic construct
DDSKVVGGKVKKPGKRGRKPRSRQSARECRARKKLRYQYLEELVSSRERAICALREELEMYKQWCMAMDQ

SEQ ID NO: 22574 - protein, 70 aa, Synthetic construct
DDSKVVGGKVKKPGKRGRKPAKIDLARECRARKKLRYQYLEELVSSRERAICALREELEMYKQWCMAMDQ

SEQ ID NO: 22575 - protein, 70 aa, Synthetic construct
DDSKVVGGKVKKPGKRGRKPAKIDLKAKLEARKKLRYQYLEELVSSRERAICALREELEMYKQWCMAMDQ

SEQ ID NO: 22576 - protein, 70 aa, Synthetic construct
DDSKVVGGKVKKPGKRGRKPAKIDLKAKLERSRQSRYQYLEELVSSRERAICALREELEMYKQWCMAMDQ

SEQ ID NO: 22577 - protein, 70 aa, Synthetic construct
SIETLLEAARFLEWQQERLRLEQEREQEQKKANSLARLAHTLPVEEPRMEAPPLPLSPPAPPPAPPPPLA

SEQ ID NO: 22578 - protein, 70 aa, Synthetic construct
SIETLLEAARFLEWQAQQQQLEQEREQEQKKANSLARLAHTLPVEEPRMEAPPLPLSPPAPPPAPPPPLA

SEQ ID NO: 22579 - protein, 70 aa, Synthetic construct
SIETLLEAARFLEWQAQQQQRAREEEQEQKKANSLARLAHTLPVEEPRMEAPPLPLSPPAPPPAPPPPLA

SEQ ID NO: 22580 - protein, 70 aa, Synthetic construct
SIETLLEAARFLEWQAQQQQRAREEQERLRKANSLARLAHTLPVEEPRMEAPPLPLSPPAPPPAPPPPLA

SEQ ID NO: 22581 - protein, 70 aa, Synthetic construct
SIETLLEAARFLEWQAQQQQRAREEQERLRLEQERARLAHTLPVEEPRMEAPPLPLSPPAPPPAPPPPLA

SEQ ID NO: 22582 - protein, 70 aa, Synthetic construct
SIETLLEAARFLEWQAQQQQRAREEQERLRLEQEREQEQKTLPVEEPRMEAPPLPLSPPAPPPAPPPPLA

SEQ ID NO: 22583 - protein, 70 aa, Synthetic construct
SIETLLEAARFLEWQAQQQQRAREEQERLRLEQEREQEQKKANSLEPRMEAPPLPLSPPAPPPAPPPPLA

SEQ ID NO: 22584 - protein, 70 aa, Synthetic construct
SIETLLEAARFLEWQAQQQQRAREEQERLRLEQEREQEQKKANSLARLAHAPPLPLSPPAPPPAPPPPLA

SEQ ID NO: 22585 - protein, 70 aa, Synthetic construct
SIETLLEAARFLEWQAQQQQRAREEQERLRLEQEREQEQKKANSLARLAHTLPVELSPPAPPPAPPPPLA

SEQ ID NO: 22586 - protein, 70 aa, Synthetic construct
SIETLLEAARFLEWQAQQQQRAREEQERLRLEQEREQEQKKANSLARLAHTLPVEEPRMEPPPAPPPPLA

SEQ ID NO: 22587 - protein, 70 aa, Synthetic construct
SIETLLEAARFLEWQAQQQQRAREEQERLRLEQEREQEQKKANSLARLAHTLPVEEPRMEAPPLPPPPLA

SEQ ID NO: 22588 - protein, 70 aa, Synthetic construct
SIETLLEAARFLEWQAQQQQRAREEQERLRLEQEREQEQKKANSLARLAHTLPVEEPRMEAPPLPLSPPA

SEQ ID NO: 22589 - protein, 70 aa, Synthetic construct
DKKTSNLSVLRTALRYIQSLKRKEKEYEHEMERLAREKIATQQRLAELKHELSQWMDVLEIDRVLRQTGQ

SEQ ID NO: 22590 - protein, 70 aa, Synthetic construct
TLKRNNLSVLRTALRYIQSLKRKEKEYEHEMERLAREKIATQQRLAELKHELSQWMDVLEIDRVLRQTGQ

SEQ ID NO: 22591 - protein, 70 aa, Synthetic construct
TLKRNIPNVDDKKTSNLSVLRTALRYIQSLKRKEKEYEHEMERLAREKIATQQRLAELKHELSQWMDVLE

SEQ ID NO: 22592 - protein, 70 aa, Synthetic construct
EADQQMDNLYLKALEGFIAVVTQDGDMIFLSENISKFMGLTQVELTGHSIFDFTHPCDHEEIRENLSLKN

SEQ ID NO: 22593 - protein, 70 aa, Synthetic construct
SVCSEMDNLYLKALEGFIAVVTQDGDMIFLSENISKFMGLTQVELTGHSIFDFTHPCDHEEIRENLSLKN

SEQ ID NO: 22594 - protein, 70 aa, Synthetic construct
SVCSENESEALKALEGFIAVVTQDGDMIFLSENISKFMGLTQVELTGHSIFDFTHPCDHEEIRENLSLKN

SEQ ID NO: 22595 - protein, 70 aa, Synthetic construct
SVCSENESEAEADQQGFIAVVTQDGDMIFLSENISKFMGLTQVELTGHSIFDFTHPCDHEEIRENLSLKN

SEQ ID NO: 22596 - protein, 70 aa, Synthetic construct
SVCSENESEAEADQQMDNLYVTQDGDMIFLSENISKFMGLTQVELTGHSIFDFTHPCDHEEIRENLSLKN

SEQ ID NO: 22597 - protein, 70 aa, Synthetic construct
SVCSENESEAEADQQMDNLYLKALEGFIAVVTQDGDMIFLTQVELTGHSIFDFTHPCDHEEIRENLSLKN

SEQ ID NO: 22598 - protein, 70 aa, Synthetic construct
SVCSENESEAEADQQMDNLYLKALEGFIAVVTQDGDMIFLSENISTGHSIFDFTHPCDHEEIRENLSLKN

SEQ ID NO: 22599 - protein, 70 aa, Synthetic construct
SVCSENESEAEADQQMDNLYLKALEGFIAVVTQDGDMIFLSENISKFMGLFDFTHPCDHEEIRENLSLKN

SEQ ID NO: 22600 - protein, 70 aa, Synthetic construct
SVCSENESEAEADQQMDNLYLKALEGFIAVVTQDGDMIFLSENISKFMGLTQVELPCDHEEIRENLSLKN

SEQ ID NO: 22601 - protein, 70 aa, Synthetic construct
SVCSENESEAEADQQMDNLYLKALEGFIAVVTQDGDMIFLSENISKFMGLTQVELTGHSIEIRENLSLKN

SEQ ID NO: 22602 - protein, 70 aa, Synthetic construct
SVCSENESEAEADQQMDNLYLKALEGFIAVVTQDGDMIFLSENISKFMGLTQVELTGHSIFDFTHLSLKN

SEQ ID NO: 22603 - protein, 70 aa, Synthetic construct
SVCSENESEAEADQQMDNLYLKALEGFIAVVTQDGDMIFLSENISKFMGLTQVELTGHSIFDFTHPCDHE

SEQ ID NO: 22604 - protein, 70 aa, Synthetic construct
HALDSENMTKSHQNLCTKGQVVSGQYRMLAKHGGYVWLETQGTVIYNPRNLQPQCIMCVNYVLSEIEKND

SEQ ID NO: 22605 - protein, 70 aa, Synthetic construct
LLGRSAYEFYHALDSCTKGQVVSGQYRMLAKHGGYVWLETQGTVIYNPRNLQPQCIMCVNYVLSEIEKND

SEQ ID NO: 22606 - protein, 70 aa, Synthetic construct
LLGRSAYEFYHALDSENMTKSHQNLCTKGQVVSGQYRMLAKHGGYVWLETLQPQCIMCVNYVLSEIEKND

SEQ ID NO: 22607 - protein, 70 aa, Synthetic construct
LLGRSAYEFYHALDSENMTKSHQNLCTKGQVVSGQYRMLAKHGGYVWLETQGTVIYNPRNLQPQCIEKND

SEQ ID NO: 22608 - protein, 70 aa, Synthetic construct
VRERKRILDYNEAFNALRRALRHDLGGKRLSKIATLRRAIHRIAALSLVLGHLECHGPAARGDTGDTGAS

SEQ ID NO: 22609 - protein, 70 aa, Synthetic construct
VRERKRILDYNEAFNALRRALRHDLGGKRLSKIATLRRAIHRIAALSLVLRASPAHGPAARGDTGDTGAS

SEQ ID NO: 22610 - protein, 70 aa, Synthetic construct
VRERKRILDYNEAFNALRRALRHDLGGKRLSKIATLRRAIHRIAALSLVLRASPAPRGPCRGDTGDTGAS

SEQ ID NO: 22611 - protein, 70 aa, Synthetic construct
VRERKRILDYNEAFNALRRALRHDLGGKRLSKIATLRRAIHRIAALSLVLRASPAPRGPCGHLECDTGAS

SEQ ID NO: 22612 - protein, 70 aa, Synthetic construct
VRERKRILDYNEAFNALRRALRHDLGGKRLSKIATLRRAIHRIAALSLVLRASPAPRGPCGHLECHGPAA

SEQ ID NO: 22613 - protein, 70 aa, Synthetic construct
LSELEDLKDAKLQTLKELFPQRSDNDLLKLIESTSTMDGAIAAALLMFGDAGGGPRKRKLSSSSEPYEED

SEQ ID NO: 22614 - protein, 70 aa, Synthetic construct
RNDDIDLKDAKLQTLKELFPQRSDNDLLKLIESTSTMDGAIAAALLMFGDAGGGPRKRKLSSSSEPYEED

SEQ ID NO: 22615 - protein, 70 aa, Synthetic construct
RNDDISELEDLSELEDLKDAKLQTLKELFPQRSDNDLLKLIESTSTMDGAIAAALRKRKLSSSSEPYEED

SEQ ID NO: 22616 - protein, 70 aa, Synthetic construct
RNDDISELEDLSELEDLKDAKLQTLKELFPQRSDNDLLKLIESTSTMDGAIAAALLMFGDSSSSEPYEED

SEQ ID NO: 22617 - protein, 70 aa, Synthetic construct
RNDDISELEDLSELEDLKDAKLQTLKELFPQRSDNDLLKLIESTSTMDGAIAAALLMFGDAGGGPPYEED

SEQ ID NO: 22618 - protein, 70 aa, Synthetic construct
RNDDISELEDLSELEDLKDAKLQTLKELFPQRSDNDLLKLIESTSTMDGAIAAALLMFGDAGGGPRKRKL

SEQ ID NO: 22619 - protein, 70 aa, Synthetic construct
LTPLAVQAAPQVLTQENLATVLTGVMVPAGAVTQPLLIPISIAGQVAGQQGLAVWTIPTATVAALPGLTA

SEQ ID NO: 22620 - protein, 70 aa, Synthetic construct
APSQPVQAAPQVLTQENLATVLTGVMVPAGAVTQPLLIPISIAGQVAGQQGLAVWTIPTATVAALPGLTA

SEQ ID NO: 22621 - protein, 70 aa, Synthetic construct
APSQPQASQTQVLTQENLATVLTGVMVPAGAVTQPLLIPISIAGQVAGQQGLAVWTIPTATVAALPGLTA

SEQ ID NO: 22622 - protein, 70 aa, Synthetic construct
APSQPQASQTLTPLAENLATVLTGVMVPAGAVTQPLLIPISIAGQVAGQQGLAVWTIPTATVAALPGLTA

SEQ ID NO: 22623 - protein, 70 aa, Synthetic construct
APSQPQASQTLTPLAVQAAPVLTGVMVPAGAVTQPLLIPISIAGQVAGQQGLAVWTIPTATVAALPGLTA

SEQ ID NO: 22624 - protein, 70 aa, Synthetic construct
APSQPQASQTLTPLAVQAAPQVLTQENLATVLTGVMVPAGAVTQPLLIPIGLAVWTIPTATVAALPGLTA

SEQ ID NO: 22625 - protein, 70 aa, Synthetic construct
LNEKRKQRRIRTTFTSAQLKELERVFAETHYPDIYTREELALKIDLTEARVQVWFQNRRAKFRKQERAAA

SEQ ID NO: 22626 - protein, 70 aa, Synthetic construct
PYKLFKQRRIRTTFTSAQLKELERVFAETHYPDIYTREELALKIDLTEARVQVWFQNRRAKFRKQERAAA

SEQ ID NO: 22627 - protein, 70 aa, Synthetic construct
DSQPGEQNDQGETGSASPDPAKKSFICKACDKSFHFYCRLKVHMKRCRVAKSKQVQCKECSETKDSKKEL

SEQ ID NO: 22628 - protein, 70 aa, Synthetic construct
DVKPPCLYQMPLSGQQSSIKVEDIQMHNYQQHSHLPPQSEEMMPHSGSVYYKPSSPPTPTTPGFQVQHSP

SEQ ID NO: 22629 - protein, 70 aa, Synthetic construct
TFMDNCLYQMPLSGQQSSIKVEDIQMHNYQQHSHLPPQSEEMMPHSGSVYYKPSSPPTPTTPGFQVQHSP

SEQ ID NO: 22630 - protein, 70 aa, Synthetic construct
TFMDNYSTGYPLSGQQSSIKVEDIQMHNYQQHSHLPPQSEEMMPHSGSVYYKPSSPPTPTTPGFQVQHSP

SEQ ID NO: 22631 - protein, 70 aa, Synthetic construct
TFMDNYSTGYDVKPPQSSIKVEDIQMHNYQQHSHLPPQSEEMMPHSGSVYYKPSSPPTPTTPGFQVQHSP

SEQ ID NO: 22632 - protein, 70 aa, Synthetic construct
TFMDNYSTGYDVKPPCLYQMPLSGQMHNYQQHSHLPPQSEEMMPHSGSVYYKPSSPPTPTTPGFQVQHSP

SEQ ID NO: 22633 - protein, 70 aa, Synthetic construct
TFMDNYSTGYDVKPPCLYQMPLSGQQSSIKVEDIQPPQSEEMMPHSGSVYYKPSSPPTPTTPGFQVQHSP

SEQ ID NO: 22634 - protein, 70 aa, Synthetic construct
TFMDNYSTGYDVKPPCLYQMPLSGQQSSIKVEDIQMHNYQEMMPHSGSVYYKPSSPPTPTTPGFQVQHSP

SEQ ID NO: 22635 - protein, 70 aa, Synthetic construct
TFMDNYSTGYDVKPPCLYQMPLSGQQSSIKVEDIQMHNYQQHSHLSGSVYYKPSSPPTPTTPGFQVQHSP

SEQ ID NO: 22636 - protein, 70 aa, Synthetic construct
TFMDNYSTGYDVKPPCLYQMPLSGQQSSIKVEDIQMHNYQQHSHLPPQSEYKPSSPPTPTTPGFQVQHSP

SEQ ID NO: 22637 - protein, 70 aa, Synthetic construct
TFMDNYSTGYDVKPPCLYQMPLSGQQSSIKVEDIQMHNYQQHSHLPPQSEEMMPHPPTPTTPGFQVQHSP

SEQ ID NO: 22638 - protein, 70 aa, Synthetic construct
TFMDNYSTGYDVKPPCLYQMPLSGQQSSIKVEDIQMHNYQQHSHLPPQSEEMMPHSGSVYTPGFQVQHSP

SEQ ID NO: 22639 - protein, 70 aa, Synthetic construct
TFMDNYSTGYDVKPPCLYQMPLSGQQSSIKVEDIQMHNYQQHSHLPPQSEEMMPHSGSVYYKPSSVQHSP

SEQ ID NO: 22640 - protein, 70 aa, Synthetic construct
TFMDNYSTGYDVKPPCLYQMPLSGQQSSIKVEDIQMHNYQQHSHLPPQSEEMMPHSGSVYYKPSSPPTPT

SEQ ID NO: 22641 - protein, 70 aa, Synthetic construct
ARLEQNGSPMGARGRPNGAVAKAVGGLMIPVFCVVEQLDGSLEYDNREEHAEFVLVRKDVLFSQLVETAL

SEQ ID NO: 22642 - protein, 70 aa, Synthetic construct
DVKGPNGSPMGARGRPNGAVAKAVGGLMIPVFCVVEQLDGSLEYDNREEHAEFVLVRKDVLFSQLVETAL

SEQ ID NO: 22643 - protein, 70 aa, Synthetic construct
DVKGPPPVKVGARGRPNGAVAKAVGGLMIPVFCVVEQLDGSLEYDNREEHAEFVLVRKDVLFSQLVETAL

SEQ ID NO: 22644 - protein, 70 aa, Synthetic construct
DVKGPPPVKVARLEQPNGAVAKAVGGLMIPVFCVVEQLDGSLEYDNREEHAEFVLVRKDVLFSQLVETAL

SEQ ID NO: 22645 - protein, 70 aa, Synthetic construct
DVKGPPPVKVARLEQNGSPMAKAVGGLMIPVFCVVEQLDGSLEYDNREEHAEFVLVRKDVLFSQLVETAL

SEQ ID NO: 22646 - protein, 70 aa, Synthetic construct
DVKGPPPVKVARLEQNGSPMGARGRGLMIPVFCVVEQLDGSLEYDNREEHAEFVLVRKDVLFSQLVETAL

SEQ ID NO: 22647 - protein, 70 aa, Synthetic construct
DVKGPPPVKVARLEQNGSPMGARGRPNGAVVFCVVEQLDGSLEYDNREEHAEFVLVRKDVLFSQLVETAL

SEQ ID NO: 22648 - protein, 70 aa, Synthetic construct
DVKGPPPVKVARLEQNGSPMGARGRPNGAVAKAVGGLMIPVFCVVNREEHAEFVLVRKDVLFSQLVETAL

SEQ ID NO: 22649 - protein, 70 aa, Synthetic construct
DVKGPPPVKVARLEQNGSPMGARGRPNGAVAKAVGGLMIPVFCVVEQLDGAEFVLVRKDVLFSQLVETAL

SEQ ID NO: 22650 - protein, 70 aa, Synthetic construct
DVKGPPPVKVARLEQNGSPMGARGRPNGAVAKAVGGLMIPVFCVVEQLDGSLEYDVRKDVLFSQLVETAL

SEQ ID NO: 22651 - protein, 70 aa, Synthetic construct
DVKGPPPVKVARLEQNGSPMGARGRPNGAVAKAVGGLMIPVFCVVEQLDGSLEYDNREEHLFSQLVETAL

SEQ ID NO: 22652 - protein, 70 aa, Synthetic construct
DVKGPPPVKVARLEQNGSPMGARGRPNGAVAKAVGGLMIPVFCVVEQLDGSLEYDNREEHAEFVLVETAL

SEQ ID NO: 22653 - protein, 70 aa, Synthetic construct
DVKGPPPVKVARLEQNGSPMGARGRPNGAVAKAVGGLMIPVFCVVEQLDGSLEYDNREEHAEFVLVRKDV

SEQ ID NO: 22654 - protein, 70 aa, Synthetic construct
PTAKAKECLFRMADSGESLCQNSIEELDGVLTSIFKHEIPYYEFQSLQTEICSQNKYTHFKELPTLLHCA

SEQ ID NO: 22655 - protein, 70 aa, Synthetic construct
VKATTKECLFRMADSGESLCQNSIEELDGVLTSIFKHEIPYYEFQSLQTEICSQNKYTHFKELPTLLHCA

SEQ ID NO: 22656 - protein, 70 aa, Synthetic construct
VKATTKIKYYPTAKAKECLFQNSIEELDGVLTSIFKHEIPYYEFQSLQTEICSQNKYTHFKELPTLLHCA

SEQ ID NO: 22657 - protein, 70 aa, Synthetic construct
VKATTKIKYYPTAKAKECLFRMADSELDGVLTSIFKHEIPYYEFQSLQTEICSQNKYTHFKELPTLLHCA

SEQ ID NO: 22658 - protein, 70 aa, Synthetic construct
VKATTKIKYYPTAKAKECLFRMADSGESLCQNSIEELDGVLTSIFKHEIPYYEFQKYTHFKELPTLLHCA

SEQ ID NO: 22659 - protein, 70 aa, Synthetic construct
VKATTKIKYYPTAKAKECLFRMADSGESLCQNSIEELDGVLTSIFKHEIPYYEFQSLQTEICSQNKYTHF

SEQ ID NO: 22660 - protein, 70 aa, Synthetic construct
ASLGSSQGSVIHFSHGEYFYSLFSETINTELLKNLDLAVLELMQSSVDNTKMVSAVLNGMLDQSFRERAN

SEQ ID NO: 22661 - protein, 70 aa, Synthetic construct
LLLNPSQGSVIHFSHGEYFYSLFSETINTELLKNLDLAVLELMQSSVDNTKMVSAVLNGMLDQSFRERAN

SEQ ID NO: 22662 - protein, 70 aa, Synthetic construct
LLLNPAVLSTIHFSHGEYFYSLFSETINTELLKNLDLAVLELMQSSVDNTKMVSAVLNGMLDQSFRERAN

SEQ ID NO: 22663 - protein, 70 aa, Synthetic construct
LLLNPAVLSTASLGSSQGSVIHFSHGEYFYSLFSETINTELLKNLDLAVLELMQSVLNGMLDQSFRERAN

SEQ ID NO: 22664 - protein, 70 aa, Synthetic construct
LLLNPAVLSTASLGSSQGSVIHFSHGEYFYSLFSETINTELLKNLDLAVLELMQSSVDNTLDQSFRERAN

SEQ ID NO: 22665 - protein, 70 aa, Synthetic construct
LLLNPAVLSTASLGSSQGSVIHFSHGEYFYSLFSETINTELLKNLDLAVLELMQSSVDNTKMVSARERAN

SEQ ID NO: 22666 - protein, 70 aa, Synthetic construct
LLLNPAVLSTASLGSSQGSVIHFSHGEYFYSLFSETINTELLKNLDLAVLELMQSSVDNTKMVSAVLNGM

SEQ ID NO: 22667 - protein, 70 aa, Synthetic construct
SEEEQRLVQQAFQRNFFSMARQLPMKIRINGREDRAEASAAALNLTTSSIGSINMSVDIDGTTYAGVLFA

SEQ ID NO: 22668 - protein, 70 aa, Synthetic construct
EPAEKRLVQQAFQRNFFSMARQLPMKIRINGREDRAEASAAALNLTTSSIGSINMSVDIDGTTYAGVLFA

SEQ ID NO: 22669 - protein, 70 aa, Synthetic construct
EPAEKKASRLAFQRNFFSMARQLPMKIRINGREDRAEASAAALNLTTSSIGSINMSVDIDGTTYAGVLFA

SEQ ID NO: 22670 - protein, 70 aa, Synthetic construct
EPAEKKASRLSEEEQFFSMARQLPMKIRINGREDRAEASAAALNLTTSSIGSINMSVDIDGTTYAGVLFA

SEQ ID NO: 22671 - protein, 70 aa, Synthetic construct
EPAEKKASRLSEEEQRLVQQRQLPMKIRINGREDRAEASAAALNLTTSSIGSINMSVDIDGTTYAGVLFA

SEQ ID NO: 22672 - protein, 70 aa, Synthetic construct
EPAEKKASRLSEEEQRLVQQAFQRNKIRINGREDRAEASAAALNLTTSSIGSINMSVDIDGTTYAGVLFA

SEQ ID NO: 22673 - protein, 70 aa, Synthetic construct
EPAEKKASRLSEEEQRLVQQAFQRNFFSMAGREDRAEASAAALNLTTSSIGSINMSVDIDGTTYAGVLFA

SEQ ID NO: 22674 - protein, 70 aa, Synthetic construct
EPAEKKASRLSEEEQRLVQQAFQRNFFSMARQLPMAEASAAALNLTTSSIGSINMSVDIDGTTYAGVLFA

SEQ ID NO: 22675 - protein, 70 aa, Synthetic construct
EPAEKKASRLSEEEQRLVQQAFQRNFFSMARQLPMKIRINAALNLTTSSIGSINMSVDIDGTTYAGVLFA

SEQ ID NO: 22676 - protein, 70 aa, Synthetic construct
EPAEKKASRLSEEEQRLVQQAFQRNFFSMARQLPMKIRINGREDRTTSSIGSINMSVDIDGTTYAGVLFA

SEQ ID NO: 22677 - protein, 70 aa, Synthetic construct
EPAEKKASRLSEEEQRLVQQAFQRNFFSMARQLPMKIRINGREDRAEASAGSINMSVDIDGTTYAGVLFA

SEQ ID NO: 22678 - protein, 70 aa, Synthetic construct
EPAEKKASRLSEEEQRLVQQAFQRNFFSMARQLPMKIRINGREDRAEASAAALNLSVDIDGTTYAGVLFA

SEQ ID NO: 22679 - protein, 70 aa, Synthetic construct
CKSCGIWYRSYCSGRQREAAPVSEENEDSAHQISSLCPFPQCTKSFSNARALEMHLNSHSGVKMEEFLPP

SEQ ID NO: 22680 - protein, 70 aa, Synthetic construct
CKSCGIWYRSERNLQQREAAPVSEENEDSAHQISSLCPFPQCTKSFSNARALEMHLNSHSGVKMEEFLPP

SEQ ID NO: 22681 - protein, 70 aa, Synthetic construct
CKSCGIWYRSERNLQAHLMYPVSEENEDSAHQISSLCPFPQCTKSFSNARALEMHLNSHSGVKMEEFLPP

SEQ ID NO: 22682 - protein, 70 aa, Synthetic construct
CKSCGIWYRSERNLQAHLMYYCSGRNEDSAHQISSLCPFPQCTKSFSNARALEMHLNSHSGVKMEEFLPP

SEQ ID NO: 22683 - protein, 70 aa, Synthetic construct
CKSCGIWYRSERNLQAHLMYYCSGRQREAAHQISSLCPFPQCTKSFSNARALEMHLNSHSGVKMEEFLPP

SEQ ID NO: 22684 - protein, 70 aa, Synthetic construct
CKSCGIWYRSERNLQAHLMYYCSGRQREAAPVSEELCPFPQCTKSFSNARALEMHLNSHSGVKMEEFLPP

SEQ ID NO: 22685 - protein, 70 aa, Synthetic construct
CKSCGIWYRSERNLQAHLMYYCSGRQREAAPVSEENEDSAQCTKSFSNARALEMHLNSHSGVKMEEFLPP

SEQ ID NO: 22686 - protein, 70 aa, Synthetic construct
CKSCGIWYRSERNLQAHLMYYCSGRQREAAPVSEENEDSAHQISSLCPFPQCTKSLNSHSGVKMEEFLPP

SEQ ID NO: 22687 - protein, 70 aa, Synthetic construct
CKSCGIWYRSERNLQAHLMYYCSGRQREAAPVSEENEDSAHQISSLCPFPQCTKSFSNARALEMHLNSHS

SEQ ID NO: 22688 - protein, 70 aa, Synthetic construct
PALHQRPPVHQGHPSPRCAWSPSLCSPRAGDSGAPAPLTGLLPPPPPPHRQDGAPKAPLPPPPAFWRPWP

SEQ ID NO: 22689 - protein, 70 aa, Synthetic construct
SLDPARPPVHQGHPSPRCAWSPSLCSPRAGDSGAPAPLTGLLPPPPPPHRQDGAPKAPLPPPPAFWRPWP

SEQ ID NO: 22690 - protein, 70 aa, Synthetic construct
SLDPAAPALGQGHPSPRCAWSPSLCSPRAGDSGAPAPLTGLLPPPPPPHRQDGAPKAPLPPPPAFWRPWP

SEQ ID NO: 22691 - protein, 70 aa, Synthetic construct
SLDPAAPALGPALHQPRCAWSPSLCSPRAGDSGAPAPLTGLLPPPPPPHRQDGAPKAPLPPPPAFWRPWP

SEQ ID NO: 22692 - protein, 70 aa, Synthetic construct
SLDPAAPALGPALHQRPPVHSPSLCSPRAGDSGAPAPLTGLLPPPPPPHRQDGAPKAPLPPPPAFWRPWP

SEQ ID NO: 22693 - protein, 70 aa, Synthetic construct
SLDPAAPALGPALHQRPPVHQGHPSSPRAGDSGAPAPLTGLLPPPPPPHRQDGAPKAPLPPPPAFWRPWP

SEQ ID NO: 22694 - protein, 70 aa, Synthetic construct
SLDPAAPALGPALHQRPPVHQGHPSPRCAWDSGAPAPLTGLLPPPPPPHRQDGAPKAPLPPPPAFWRPWP

SEQ ID NO: 22695 - protein, 70 aa, Synthetic construct
SLDPAAPALGPALHQRPPVHQGHPSPRCAWSPSLCAPLTGLLPPPPPPHRQDGAPKAPLPPPPAFWRPWP

SEQ ID NO: 22696 - protein, 70 aa, Synthetic construct
SLDPAAPALGPALHQRPPVHQGHPSPRCAWSPSLCSPRAGLLPPPPPPHRQDGAPKAPLPPPPAFWRPWP

SEQ ID NO: 22697 - protein, 70 aa, Synthetic construct
SLDPAAPALGPALHQRPPVHQGHPSPRCAWSPSLCSPRAGDSGAPPPPHRQDGAPKAPLPPPPAFWRPWP

SEQ ID NO: 22698 - protein, 70 aa, Synthetic construct
SLDPAAPALGPALHQRPPVHQGHPSPRCAWSPSLCSPRAGDSGAPAPLTGQDGAPKAPLPPPPAFWRPWP

SEQ ID NO: 22699 - protein, 70 aa, Synthetic construct
SLDPAAPALGPALHQRPPVHQGHPSPRCAWSPSLCSPRAGDSGAPAPLTGLLPPPKAPLPPPPAFWRPWP

SEQ ID NO: 22700 - protein, 70 aa, Synthetic construct
SLDPAAPALGPALHQRPPVHQGHPSPRCAWSPSLCSPRAGDSGAPAPLTGLLPPPPPPHRPPPAFWRPWP

SEQ ID NO: 22701 - protein, 70 aa, Synthetic construct
KIPGYRWGDIKINIIGEKDDLPIKIYGRIIPCKHAFCYHCANLYDKVGYKVCPRCRYPVLRIEAHKRGSV

SEQ ID NO: 22702 - protein, 70 aa, Synthetic construct
KIPGYRWGDIKINIIGEKDDLPIHFCDKCDLPIKIYGRIIPCKHAKVGYKVCPRCRYPVLRIEAHKRGSV

SEQ ID NO: 22703 - protein, 70 aa, Synthetic construct
HEITRSTITEMAAAQGLVDARFPFPALPFTTHLFHPKQGAIAHVLPALHKDRPRFDFANLAVAATQEDPP

SEQ ID NO: 22704 - protein, 70 aa, Synthetic construct
NHWTLGYPNVMAAAQGLVDARFPFPALPFTTHLFHPKQGAIAHVLPALHKDRPRFDFANLAVAATQEDPP

SEQ ID NO: 22705 - protein, 70 aa, Synthetic construct
NHWTLGYPNVHEITRGLVDARFPFPALPFTTHLFHPKQGAIAHVLPALHKDRPRFDFANLAVAATQEDPP

SEQ ID NO: 22706 - protein, 70 aa, Synthetic construct
NHWTLGYPNVHEITRSTITERFPFPALPFTTHLFHPKQGAIAHVLPALHKDRPRFDFANLAVAATQEDPP

SEQ ID NO: 22707 - protein, 70 aa, Synthetic construct
NHWTLGYPNVHEITRSTITEMAAAQALPFTTHLFHPKQGAIAHVLPALHKDRPRFDFANLAVAATQEDPP

SEQ ID NO: 22708 - protein, 70 aa, Synthetic construct
NHWTLGYPNVHEITRSTITEMAAAQGLVDATHLFHPKQGAIAHVLPALHKDRPRFDFANLAVAATQEDPP

SEQ ID NO: 22709 - protein, 70 aa, Synthetic construct
NHWTLGYPNVHEITRSTITEMAAAQGLVDARFPFPPKQGAIAHVLPALHKDRPRFDFANLAVAATQEDPP

SEQ ID NO: 22710 - protein, 70 aa, Synthetic construct
NHWTLGYPNVHEITRSTITEMAAAQGLVDARFPFPALPFTIAHVLPALHKDRPRFDFANLAVAATQEDPP

SEQ ID NO: 22711 - protein, 70 aa, Synthetic construct
NHWTLGYPNVHEITRSTITEMAAAQGLVDARFPFPALPFTTHLFHPALHKDRPRFDFANLAVAATQEDPP

SEQ ID NO: 22712 - protein, 70 aa, Synthetic construct
NHWTLGYPNVHEITRSTITEMAAAQGLVDARFPFPALPFTTHLFHPKQGADRPRFDFANLAVAATQEDPP

SEQ ID NO: 22713 - protein, 70 aa, Synthetic construct
WPHPADPSFYGSLPYPFHSHVPLHYYPHVGVTAAAAAAAASGAAAAASSPFATSIRPLDTFRALSHPYSR

SEQ ID NO: 22714 - protein, 70 aa, Synthetic construct
WPHPADPSFYTYMMTPFHSHVPLHYYPHVGVTAAAAAAAASGAAAAASSPFATSIRPLDTFRALSHPYSR

SEQ ID NO: 22715 - protein, 70 aa, Synthetic construct
WPHPADPSFYTYMMTHAAATVPLHYYPHVGVTAAAAAAAASGAAAAASSPFATSIRPLDTFRALSHPYSR

SEQ ID NO: 22716 - protein, 70 aa, Synthetic construct
WPHPADPSFYTYMMTHAAATGSLPYPFHSHVPLHYAAAAASGAAAAASSPFATSIRPLDTFRALSHPYSR

SEQ ID NO: 22717 - protein, 70 aa, Synthetic construct
WPHPADPSFYTYMMTHAAATGSLPYPFHSHVPLHYYPHVGSGAAAAASSPFATSIRPLDTFRALSHPYSR

SEQ ID NO: 22718 - protein, 70 aa, Synthetic construct
WPHPADPSFYTYMMTHAAATGSLPYPFHSHVPLHYYPHVGVTAAAAASSPFATSIRPLDTFRALSHPYSR

SEQ ID NO: 22719 - protein, 70 aa, Synthetic construct
WPHPADPSFYTYMMTHAAATGSLPYPFHSHVPLHYYPHVGVTAAAAAAAASGAAARPLDTFRALSHPYSR

SEQ ID NO: 22720 - protein, 70 aa, Synthetic construct
WPHPADPSFYTYMMTHAAATGSLPYPFHSHVPLHYYPHVGVTAAAAAAAASGAAAAASSPFRALSHPYSR

SEQ ID NO: 22721 - protein, 70 aa, Synthetic construct
WPHPADPSFYTYMMTHAAATGSLPYPFHSHVPLHYYPHVGVTAAAAAAAASGAAAAASSPFATSIHPYSR

SEQ ID NO: 22722 - protein, 70 aa, Synthetic construct
RRREKRRQLDARRSKCRIRLGGHMEQWCLLKERLGFSLHSQLAKFLLDRYTSSGCVLCAGPEPLPPKGLQ

SEQ ID NO: 22723 - protein, 70 aa, Synthetic construct
ASSPARRQLDARRSKCRIRLGGHMEQWCLLKERLGFSLHSQLAKFLLDRYTSSGCVLCAGPEPLPPKGLQ

SEQ ID NO: 22724 - protein, 70 aa, Synthetic construct
ASSPAVDVSCARRSKCRIRLGGHMEQWCLLKERLGFSLHSQLAKFLLDRYTSSGCVLCAGPEPLPPKGLQ

SEQ ID NO: 22725 - protein, 70 aa, Synthetic construct
ASSPAVDVSCRRREKCRIRLGGHMEQWCLLKERLGFSLHSQLAKFLLDRYTSSGCVLCAGPEPLPPKGLQ

SEQ ID NO: 22726 - protein, 70 aa, Synthetic construct
ASSPAVDVSCRRREKRRQLDGGHMEQWCLLKERLGFSLHSQLAKFLLDRYTSSGCVLCAGPEPLPPKGLQ

SEQ ID NO: 22727 - protein, 70 aa, Synthetic construct
ASSPAVDVSCRRREKRRQLDARRSKQWCLLKERLGFSLHSQLAKFLLDRYTSSGCVLCAGPEPLPPKGLQ

SEQ ID NO: 22728 - protein, 70 aa, Synthetic construct
TTSSQILARKRRRGIIEKRRRDRINNSLSELRRLVPSAFEKQGSAKLEKAEILQMTVDHLKMLHTAGGKG

SEQ ID NO: 22729 - protein, 70 aa, Synthetic construct
LSSALILARKRRRGIIEKRRRDRINNSLSELRRLVPSAFEKQGSAKLEKAEILQMTVDHLKMLHTAGGKG

SEQ ID NO: 22730 - protein, 70 aa, Synthetic construct
IQVLRIHLLELEKVNELCKDFCSRYIACLKTKMNSETLLSGEPGSPYSPVQSQQIQSAITGTISPQGIVV

SEQ ID NO: 22731 - protein, 70 aa, Synthetic construct
PETDNLMVKAIQVLRIHLLELEKVNELCKDFCSRYETLLSGEPGSPYSPVQSQQIQSAITGTISPQGIVV

SEQ ID NO: 22732 - protein, 70 aa, Synthetic construct
PETDNLMVKAIQVLRIHLLELEKVNELCKDFCSRYIACLKGEPGSPYSPVQSQQIQSAITGTISPQGIVV

SEQ ID NO: 22733 - protein, 70 aa, Synthetic construct
PETDNLMVKAIQVLRIHLLELEKVNELCKDFCSRYIACLKTKMNSETLLSQSQQIQSAITGTISPQGIVV

SEQ ID NO: 22734 - protein, 70 aa, Synthetic construct
PETDNLMVKAIQVLRIHLLELEKVNELCKDFCSRYIACLKTKMNSETLLSGEPGSQSAITGTISPQGIVV

SEQ ID NO: 22735 - protein, 70 aa, Synthetic construct
PETDNLMVKAIQVLRIHLLELEKVNELCKDFCSRYIACLKTKMNSETLLSGEPGSPYSPVGTISPQGIVV

SEQ ID NO: 22736 - protein, 70 aa, Synthetic construct
PETDNLMVKAIQVLRIHLLELEKVNELCKDFCSRYIACLKTKMNSETLLSGEPGSPYSPVQSQQIQGIVV

SEQ ID NO: 22737 - protein, 70 aa, Synthetic construct
PETDNLMVKAIQVLRIHLLELEKVNELCKDFCSRYIACLKTKMNSETLLSGEPGSPYSPVQSQQIQSAIT

SEQ ID NO: 22738 - protein, 70 aa, Synthetic construct
KIEADMMKLQTQITSMESNLKTIEEENKLIEQNNESLLKELAGLSQALISSLADIQLPQMGPISEQNFEA

SEQ ID NO: 22739 - protein, 70 aa, Synthetic construct
EIKELNESNLKIEADMMKLQTQITSMESNLKTIEESLLKELAGLSQALISSLADIQLPQMGPISEQNFEA

SEQ ID NO: 22740 - protein, 70 aa, Synthetic construct
EIKELNESNLKIEADMMKLQTQITSMESNLKTIEEENKLIEQNNESLLKELAGLSQALISGPISEQNFEA

SEQ ID NO: 22741 - protein, 70 aa, Synthetic construct
EIKELNESNLKIEADMMKLQTQITSMESNLKTIEEENKLIEQNNESLLKELAGLSQALISSLADIQNFEA

SEQ ID NO: 22742 - protein, 70 aa, Synthetic construct
EIKELNESNLKIEADMMKLQTQITSMESNLKTIEEENKLIEQNNESLLKELAGLSQALISSLADIQLPQM

SEQ ID NO: 22743 - protein, 70 aa, Synthetic construct
TMSHYTDEPRFTIEQIDLLQRLRRTGMTKHEILHALETLDRLDQEYGGSSYGNSTNNVPASSSTATASTQ

SEQ ID NO: 22744 - protein, 70 aa, Synthetic construct
TMSHYTDEPRFTIEQIDLLQRLRRTGMTKHEILHALETLDRLDQEHSDKFYGNSTNNVPASSSTATASTQ

SEQ ID NO: 22745 - protein, 70 aa, Synthetic construct
TMSHYTDEPRFTIEQIDLLQRLRRTGMTKHEILHALETLDRLDQEHSDKFGRRSSNNVPASSSTATASTQ

SEQ ID NO: 22746 - protein, 70 aa, Synthetic construct
TMSHYTDEPRFTIEQIDLLQRLRRTGMTKHEILHALETLDRLDQEHSDKFGRRSSYGGSSSSSTATASTQ

SEQ ID NO: 22747 - protein, 70 aa, Synthetic construct
TMSHYTDEPRFTIEQIDLLQRLRRTGMTKHEILHALETLDRLDQEHSDKFGRRSSYGGSSYGNSTTASTQ

SEQ ID NO: 22748 - protein, 70 aa, Synthetic construct
TMSHYTDEPRFTIEQIDLLQRLRRTGMTKHEILHALETLDRLDQEHSDKFGRRSSYGGSSYGNSTNNVPA

SEQ ID NO: 22749 - protein, 70 aa, Synthetic construct
LNIKAEAEGSPAAEPSPFLGKAVKALVQEKLAEPWKVYLRRFGTKDFCDGQCDFLHKAHFHCVVEECGAL

SEQ ID NO: 22750 - protein, 70 aa, Synthetic construct
SQGNPEAEGSPAAEPSPFLGKAVKALVQEKLAEPWKVYLRRFGTKDFCDGQCDFLHKAHFHCVVEECGAL

SEQ ID NO: 22751 - protein, 70 aa, Synthetic construct
SQGNPGLGSLPAAEPSPFLGKAVKALVQEKLAEPWKVYLRRFGTKDFCDGQCDFLHKAHFHCVVEECGAL

SEQ ID NO: 22752 - protein, 70 aa, Synthetic construct
SQGNPGLGSLLNIKASPFLGKAVKALVQEKLAEPWKVYLRRFGTKDFCDGQCDFLHKAHFHCVVEECGAL

SEQ ID NO: 22753 - protein, 70 aa, Synthetic construct
SQGNPGLGSLLNIKAEAEGSKAVKALVQEKLAEPWKVYLRRFGTKDFCDGQCDFLHKAHFHCVVEECGAL

SEQ ID NO: 22754 - protein, 70 aa, Synthetic construct
SQGNPGLGSLLNIKAEAEGSPAAEPLVQEKLAEPWKVYLRRFGTKDFCDGQCDFLHKAHFHCVVEECGAL

SEQ ID NO: 22755 - protein, 70 aa, Synthetic construct
SQGNPGLGSLLNIKAEAEGSPAAEPSPFLGLAEPWKVYLRRFGTKDFCDGQCDFLHKAHFHCVVEECGAL

SEQ ID NO: 22756 - protein, 70 aa, Synthetic construct
SQGNPGLGSLLNIKAEAEGSPAAEPSPFLGKAVKAKVYLRRFGTKDFCDGQCDFLHKAHFHCVVEECGAL

SEQ ID NO: 22757 - protein, 70 aa, Synthetic construct
SQGNPGLGSLLNIKAEAEGSPAAEPSPFLGKAVKALVQEKRFGTKDFCDGQCDFLHKAHFHCVVEECGAL

SEQ ID NO: 22758 - protein, 70 aa, Synthetic construct
SQGNPGLGSLLNIKAEAEGSPAAEPSPFLGKAVKALVQEKLAEPWDFCDGQCDFLHKAHFHCVVEECGAL

SEQ ID NO: 22759 - protein, 70 aa, Synthetic construct
SQGNPGLGSLLNIKAEAEGSPAAEPSPFLGKAVKALVQEKLAEPWKVYLRQCDFLHKAHFHCVVEECGAL

SEQ ID NO: 22760 - protein, 70 aa, Synthetic construct
SQGNPGLGSLLNIKAEAEGSPAAEPSPFLGKAVKALVQEKLAEPWKVYLRRFGTKHKAHFHCVVEECGAL

SEQ ID NO: 22761 - protein, 70 aa, Synthetic construct
SQGNPGLGSLLNIKAEAEGSPAAEPSPFLGKAVKALVQEKLAEPWKVYLRRFGTKDFCDGHCVVEECGAL

SEQ ID NO: 22762 - protein, 70 aa, Synthetic construct
SQGNPGLGSLLNIKAEAEGSPAAEPSPFLGKAVKALVQEKLAEPWKVYLRRFGTKDFCDGQCDFLECGAL

SEQ ID NO: 22763 - protein, 70 aa, Synthetic construct
SQGNPGLGSLLNIKAEAEGSPAAEPSPFLGKAVKALVQEKLAEPWKVYLRRFGTKDFCDGQCDFLHKAHF

SEQ ID NO: 22764 - protein, 70 aa, Synthetic construct
DRHSIDITSELWNDELQSRKKRKDPFSPDKKKPVVVSGPYIVYMLQDLDILEDWTTIRKAMATLGPHRVK

SEQ ID NO: 22765 - protein, 70 aa, Synthetic construct
LEEKIDITSELWNDELQSRKKRKDPFSPDKKKPVVVSGPYIVYMLQDLDILEDWTTIRKAMATLGPHRVK

SEQ ID NO: 22766 - protein, 70 aa, Synthetic construct
LEEKIRRLEEDRHSILQSRKKRKDPFSPDKKKPVVVSGPYIVYMLQDLDILEDWTTIRKAMATLGPHRVK

SEQ ID NO: 22767 - protein, 70 aa, Synthetic construct
LEEKIRRLEEDRHSIDITSEKRKDPFSPDKKKPVVVSGPYIVYMLQDLDILEDWTTIRKAMATLGPHRVK

SEQ ID NO: 22768 - protein, 70 aa, Synthetic construct
LEEKIRRLEEDRHSIDITSELWNDEFSPDKKKPVVVSGPYIVYMLQDLDILEDWTTIRKAMATLGPHRVK

SEQ ID NO: 22769 - protein, 70 aa, Synthetic construct
LEEKIRRLEEDRHSIDITSELWNDELQSRKKKPVVVSGPYIVYMLQDLDILEDWTTIRKAMATLGPHRVK

SEQ ID NO: 22770 - protein, 70 aa, Synthetic construct
LEEKIRRLEEDRHSIDITSELWNDELQSRKKRKDPVSGPYIVYMLQDLDILEDWTTIRKAMATLGPHRVK

SEQ ID NO: 22771 - protein, 70 aa, Synthetic construct
LEEKIRRLEEDRHSIDITSELWNDELQSRKKRKDPFSPDKKKPVVVSGPYIVYMLQDLDIMATLGPHRVK

SEQ ID NO: 22772 - protein, 70 aa, Synthetic construct
LEEKIRRLEEDRHSIDITSELWNDELQSRKKRKDPFSPDKKKPVVVSGPYIVYMLQDLDILEDWTPHRVK

SEQ ID NO: 22773 - protein, 70 aa, Synthetic construct
LEEKIRRLEEDRHSIDITSELWNDELQSRKKRKDPFSPDKKKPVVVSGPYIVYMLQDLDILEDWTTIRKA

SEQ ID NO: 22774 - protein, 70 aa, Synthetic construct
TEPPVKLEKHLHSARSEEGRLYYDGEWYIRGQTICIDKKDECPTSAVITTINHDEVWFKRPDGSKSKLYI

SEQ ID NO: 22775 - protein, 70 aa, Synthetic construct
MATLGKLEKHLHSARSEEGRLYYDGEWYIRGQTICIDKKDECPTSAVITTINHDEVWFKRPDGSKSKLYI

SEQ ID NO: 22776 - protein, 70 aa, Synthetic construct
MATLGPHRVKTEPPVSEEGRLYYDGEWYIRGQTICIDKKDECPTSAVITTINHDEVWFKRPDGSKSKLYI

SEQ ID NO: 22777 - protein, 70 aa, Synthetic construct
MATLGPHRVKTEPPVKLEKHLYYDGEWYIRGQTICIDKKDECPTSAVITTINHDEVWFKRPDGSKSKLYI

SEQ ID NO: 22778 - protein, 70 aa, Synthetic construct
MATLGPHRVKTEPPVKLEKHLHSAREWYIRGQTICIDKKDECPTSAVITTINHDEVWFKRPDGSKSKLYI

SEQ ID NO: 22779 - protein, 70 aa, Synthetic construct
MATLGPHRVKTEPPVKLEKHLHSARSEEGRGQTICIDKKDECPTSAVITTINHDEVWFKRPDGSKSKLYI

SEQ ID NO: 22780 - protein, 70 aa, Synthetic construct
MATLGPHRVKTEPPVKLEKHLHSARSEEGRLYYDGIDKKDECPTSAVITTINHDEVWFKRPDGSKSKLYI

SEQ ID NO: 22781 - protein, 70 aa, Synthetic construct
MATLGPHRVKTEPPVKLEKHLHSARSEEGRLYYDGEWYIRECPTSAVITTINHDEVWFKRPDGSKSKLYI

SEQ ID NO: 22782 - protein, 70 aa, Synthetic construct
MATLGPHRVKTEPPVKLEKHLHSARSEEGRLYYDGEWYIRGQTICIDKKDINHDEVWFKRPDGSKSKLYI

SEQ ID NO: 22783 - protein, 70 aa, Synthetic construct
MATLGPHRVKTEPPVKLEKHLHSARSEEGRLYYDGEWYIRGQTICIDKKDECPTSVWFKRPDGSKSKLYI

SEQ ID NO: 22784 - protein, 70 aa, Synthetic construct
MATLGPHRVKTEPPVKLEKHLHSARSEEGRLYYDGEWYIRGQTICIDKKDECPTSAVITTPDGSKSKLYI

SEQ ID NO: 22785 - protein, 70 aa, Synthetic construct
MATLGPHRVKTEPPVKLEKHLHSARSEEGRLYYDGEWYIRGQTICIDKKDECPTSAVITTINHDESKLYI

SEQ ID NO: 22786 - protein, 70 aa, Synthetic construct
MATLGPHRVKTEPPVKLEKHLHSARSEEGRLYYDGEWYIRGQTICIDKKDECPTSAVITTINHDEVWFKR

SEQ ID NO: 22787 - protein, 70 aa, Synthetic construct
LWSDDEYGQDVDVTTNPDEELDGDDRYDFEVVRCICEVQEENDFMIQCEECQCWQHGVCMGLLEENVPEK

SEQ ID NO: 22788 - protein, 70 aa, Synthetic construct
NLSESEYGQDVDVTTNPDEELDGDDRYDFEVVRCICEVQEENDFMIQCEECQCWQHGVCMGLLEENVPEK

SEQ ID NO: 22789 - protein, 70 aa, Synthetic construct
NLSESSSESFVDVTTNPDEELDGDDRYDFEVVRCICEVQEENDFMIQCEECQCWQHGVCMGLLEENVPEK

SEQ ID NO: 22790 - protein, 70 aa, Synthetic construct
NLSESSSESFLWSDDNPDEELDGDDRYDFEVVRCICEVQEENDFMIQCEECQCWQHGVCMGLLEENVPEK

SEQ ID NO: 22791 - protein, 70 aa, Synthetic construct
NLSESSSESFLWSDDEYGQDLDGDDRYDFEVVRCICEVQEENDFMIQCEECQCWQHGVCMGLLEENVPEK

SEQ ID NO: 22792 - protein, 70 aa, Synthetic construct
NLSESSSESFLWSDDEYGQDVDVTTRYDFEVVRCICEVQEENDFMIQCEECQCWQHGVCMGLLEENVPEK

SEQ ID NO: 22793 - protein, 70 aa, Synthetic construct
NLSESSSESFLWSDDEYGQDVDVTTNPDEEVVRCICEVQEENDFMIQCEECQCWQHGVCMGLLEENVPEK

SEQ ID NO: 22794 - protein, 70 aa, Synthetic construct
NLSESSSESFLWSDDEYGQDVDVTTNPDEELDGDDCEVQEENDFMIQCEECQCWQHGVCMGLLEENVPEK

SEQ ID NO: 22795 - protein, 70 aa, Synthetic construct
NLSESSSESFLWSDDEYGQDVDVTTNPDEELDGDDRYDFEENDFMIQCEECQCWQHGVCMGLLEENVPEK

SEQ ID NO: 22796 - protein, 70 aa, Synthetic construct
NLSESSSESFLWSDDEYGQDVDVTTNPDEELDGDDRYDFEVVRCIIQCEECQCWQHGVCMGLLEENVPEK

SEQ ID NO: 22797 - protein, 70 aa, Synthetic construct
NLSESSSESFLWSDDEYGQDVDVTTNPDEELDGDDRYDFEVVRCICEVQEENDFMIQCEECQCWQNVPEK

SEQ ID NO: 22798 - protein, 70 aa, Synthetic construct
NLSESSSESFLWSDDEYGQDVDVTTNPDEELDGDDRYDFEVVRCICEVQEENDFMIQCEECQCWQHGVCM

SEQ ID NO: 22799 - protein, 70 aa, Synthetic construct
DDSFLLEGNSNEDCKPLILPDTKPKIKDNGDLVLSSPSNVTLPQVKTEKEDFIELCTPGVIKQEKLGTVY

SEQ ID NO: 22800 - protein, 70 aa, Synthetic construct
NCLLSPLAGENEDCKPLILPDTKPKIKDNGDLVLSSPSNVTLPQVKTEKEDFIELCTPGVIKQEKLGTVY

SEQ ID NO: 22801 - protein, 70 aa, Synthetic construct
NCLLSPLAGEDDSFLPLILPDTKPKIKDNGDLVLSSPSNVTLPQVKTEKEDFIELCTPGVIKQEKLGTVY

SEQ ID NO: 22802 - protein, 70 aa, Synthetic construct
NCLLSPLAGEDDSFLLEGNSDTKPKIKDNGDLVLSSPSNVTLPQVKTEKEDFIELCTPGVIKQEKLGTVY

SEQ ID NO: 22803 - protein, 70 aa, Synthetic construct
NCLLSPLAGEDDSFLLEGNSNEDCKIKDNGDLVLSSPSNVTLPQVKTEKEDFIELCTPGVIKQEKLGTVY

SEQ ID NO: 22804 - protein, 70 aa, Synthetic construct
NCLLSPLAGEDDSFLLEGNSNEDCKPLILPDTKPKSPSNVTLPQVKTEKEDFIELCTPGVIKQEKLGTVY

SEQ ID NO: 22805 - protein, 70 aa, Synthetic construct
NCLLSPLAGEDDSFLLEGNSNEDCKPLILPDTKPKIKDNGTLPQVKTEKEDFIELCTPGVIKQEKLGTVY

SEQ ID NO: 22806 - protein, 70 aa, Synthetic construct
NCLLSPLAGEDDSFLLEGNSNEDCKPLILPDTKPKIKDNGDLVLSKTEKEDFIELCTPGVIKQEKLGTVY

SEQ ID NO: 22807 - protein, 70 aa, Synthetic construct
NCLLSPLAGEDDSFLLEGNSNEDCKPLILPDTKPKIKDNGDLVLSSPSNVDFIELCTPGVIKQEKLGTVY

SEQ ID NO: 22808 - protein, 70 aa, Synthetic construct
NCLLSPLAGEDDSFLLEGNSNEDCKPLILPDTKPKIKDNGDLVLSSPSNVTLPQVCTPGVIKQEKLGTVY

SEQ ID NO: 22809 - protein, 70 aa, Synthetic construct
NCLLSPLAGEDDSFLLEGNSNEDCKPLILPDTKPKIKDNGDLVLSSPSNVTLPQVKTEKEIKQEKLGTVY

SEQ ID NO: 22810 - protein, 70 aa, Synthetic construct
NCLLSPLAGEDDSFLLEGNSNEDCKPLILPDTKPKIKDNGDLVLSSPSNVTLPQVKTEKEDFIELLGTVY

SEQ ID NO: 22811 - protein, 70 aa, Synthetic construct
NCLLSPLAGEDDSFLLEGNSNEDCKPLILPDTKPKIKDNGDLVLSSPSNVTLPQVKTEKEDFIELCTPGV

SEQ ID NO: 22812 - protein, 70 aa, Synthetic construct
PSQAGQQQGQQKQKRHRTRFTPAQLNELERSFAKTHYPDIFMREELALRIGLTESRVQVWFQNRRAKWKK

SEQ ID NO: 22813 - protein, 70 aa, Synthetic construct
KQPGPQQQGQQKQKRHRTRFTPAQLNELERSFAKTHYPDIFMREELALRIGLTESRVQVWFQNRRAKWKK

SEQ ID NO: 22814 - protein, 70 aa, Synthetic construct
KQPGPQGGPNQKQKRHRTRFTPAQLNELERSFAKTHYPDIFMREELALRIGLTESRVQVWFQNRRAKWKK

SEQ ID NO: 22815 - protein, 70 aa, Synthetic construct
DSYAYLNASYGTEGLGSYPGYAPLPHLPPAFIPSYNAHYPKFLLPPYGMNCNGLSAVSSMNGINNFGLFP

SEQ ID NO: 22816 - protein, 70 aa, Synthetic construct
PVGPGLNASYGTEGLGSYPGYAPLPHLPPAFIPSYNAHYPKFLLPPYGMNCNGLSAVSSMNGINNFGLFP

SEQ ID NO: 22817 - protein, 70 aa, Synthetic construct
PVGPGSQEHRDSYAYGSYPGYAPLPHLPPAFIPSYNAHYPKFLLPPYGMNCNGLSAVSSMNGINNFGLFP

SEQ ID NO: 22818 - protein, 70 aa, Synthetic construct
PVGPGSQEHRDSYAYLNASYYAPLPHLPPAFIPSYNAHYPKFLLPPYGMNCNGLSAVSSMNGINNFGLFP

SEQ ID NO: 22819 - protein, 70 aa, Synthetic construct
PVGPGSQEHRDSYAYLNASYGTEGLGSYPGYAPLPHLPPAFIPSYNAHYPKFLLPAVSSMNGINNFGLFP

SEQ ID NO: 22820 - protein, 70 aa, Synthetic construct
PVGPGSQEHRDSYAYLNASYGTEGLGSYPGYAPLPHLPPAFIPSYNAHYPKFLLPPYGMNNGINNFGLFP

SEQ ID NO: 22821 - protein, 70 aa, Synthetic construct
PVGPGSQEHRDSYAYLNASYGTEGLGSYPGYAPLPHLPPAFIPSYNAHYPKFLLPPYGMNCNGLSFGLFP

SEQ ID NO: 22822 - protein, 70 aa, Synthetic construct
MHGLNHAFDQLRNVIPSFNNDKKLSKYETLQMAQIYINALSELLQTPSGGEQPPPPPASCKSDHHHLRTA

SEQ ID NO: 22823 - protein, 70 aa, Synthetic construct
LAANAHAFDQLRNVIPSFNNDKKLSKYETLQMAQIYINALSELLQTPSGGEQPPPPPASCKSDHHHLRTA

SEQ ID NO: 22824 - protein, 70 aa, Synthetic construct
LAANARERRRMHGLNPSFNNDKKLSKYETLQMAQIYINALSELLQTPSGGEQPPPPPASCKSDHHHLRTA

SEQ ID NO: 22825 - protein, 70 aa, Synthetic construct
LAANARERRRMHGLNHAFDQLRNVIPSFNNDKKLSKYETLQMAQIYINALSELLQPPASCKSDHHHLRTA

SEQ ID NO: 22826 - protein, 70 aa, Synthetic construct
LAANARERRRMHGLNHAFDQLRNVIPSFNNDKKLSKYETLQMAQIYINALSELLQTPSGGKSDHHHLRTA

SEQ ID NO: 22827 - protein, 70 aa, Synthetic construct
LAANARERRRMHGLNHAFDQLRNVIPSFNNDKKLSKYETLQMAQIYINALSELLQTPSGGEQPPPHLRTA

SEQ ID NO: 22828 - protein, 70 aa, Synthetic construct
LAANARERRRMHGLNHAFDQLRNVIPSFNNDKKLSKYETLQMAQIYINALSELLQTPSGGEQPPPPPASC

SEQ ID NO: 22829 - protein, 70 aa, Synthetic construct
GKPKIWSLAETATSPPAGHPGAHGPSAGAPLQHPAFLPSHGLYTCHIGKFSNWTNSAFLAQGSLLNMRSF

SEQ ID NO: 22830 - protein, 70 aa, Synthetic construct
GKPKIWSLAETATSPDGAPKGAHGPSAGAPLQHPAFLPSHGLYTCHIGKFSNWTNSAFLAQGSLLNMRSF

SEQ ID NO: 22831 - protein, 70 aa, Synthetic construct
GKPKIWSLAETATSPDGAPKASPPPSAGAPLQHPAFLPSHGLYTCHIGKFSNWTNSAFLAQGSLLNMRSF

SEQ ID NO: 22832 - protein, 70 aa, Synthetic construct
GKPKIWSLAETATSPDGAPKASPPPPAGHPLQHPAFLPSHGLYTCHIGKFSNWTNSAFLAQGSLLNMRSF

SEQ ID NO: 22833 - protein, 70 aa, Synthetic construct
GKPKIWSLAETATSPDGAPKASPPPPAGHPGAHGPFLPSHGLYTCHIGKFSNWTNSAFLAQGSLLNMRSF

SEQ ID NO: 22834 - protein, 70 aa, Synthetic construct
PKSSDKSKSFSIDSILAGKQLGGAKPGPGGRLGASLLAASSSLRPPFNASLMLDPHVQGGFYQLGIPFLS

SEQ ID NO: 22835 - protein, 70 aa, Synthetic construct
PKSSDKSKSFSIDSILAGKQGQKPPPGPGGRLGASLLAASSSLRPPFNASLMLDPHVQGGFYQLGIPFLS

SEQ ID NO: 22836 - protein, 70 aa, Synthetic construct
PKSSDKSKSFSIDSILAGKQGQKPPSGDELRLGASLLAASSSLRPPFNASLMLDPHVQGGFYQLGIPFLS

SEQ ID NO: 22837 - protein, 70 aa, Synthetic construct
PKSSDKSKSFSIDSILAGKQGQKPPSGDELLGGAKLLAASSSLRPPFNASLMLDPHVQGGFYQLGIPFLS

SEQ ID NO: 22838 - protein, 70 aa, Synthetic construct
RAPAPGEGEGTSWVCRQCVFAIATKRGGALKKGPYARAMLGMKLSLPYGLKGLDWDAGHLSNRQQSYCYC

SEQ ID NO: 22839 - protein, 70 aa, Synthetic construct
HAYHQGEGEGTSWVCRQCVFAIATKRGGALKKGPYARAMLGMKLSLPYGLKGLDWDAGHLSNRQQSYCYC

SEQ ID NO: 22840 - protein, 70 aa, Synthetic construct
HAYHQDCHVPTSWVCRQCVFAIATKRGGALKKGPYARAMLGMKLSLPYGLKGLDWDAGHLSNRQQSYCYC

SEQ ID NO: 22841 - protein, 70 aa, Synthetic construct
HAYHQDCHVPRAPAPGEGEGTSWVCRQCVFKKGPYARAMLGMKLSLPYGLKGLDWDAGHLSNRQQSYCYC

SEQ ID NO: 22842 - protein, 70 aa, Synthetic construct
HAYHQDCHVPRAPAPGEGEGTSWVCRQCVFAIATKARAMLGMKLSLPYGLKGLDWDAGHLSNRQQSYCYC

SEQ ID NO: 22843 - protein, 70 aa, Synthetic construct
HAYHQDCHVPRAPAPGEGEGTSWVCRQCVFAIATKRGGALGMKLSLPYGLKGLDWDAGHLSNRQQSYCYC

SEQ ID NO: 22844 - protein, 70 aa, Synthetic construct
HAYHQDCHVPRAPAPGEGEGTSWVCRQCVFAIATKRGGALKKGPYLPYGLKGLDWDAGHLSNRQQSYCYC

SEQ ID NO: 22845 - protein, 70 aa, Synthetic construct
HAYHQDCHVPRAPAPGEGEGTSWVCRQCVFAIATKRGGALKKGPYARAMLKGLDWDAGHLSNRQQSYCYC

SEQ ID NO: 22846 - protein, 70 aa, Synthetic construct
HAYHQDCHVPRAPAPGEGEGTSWVCRQCVFAIATKRGGALKKGPYARAMLGMKLSDAGHLSNRQQSYCYC

SEQ ID NO: 22847 - protein, 70 aa, Synthetic construct
HAYHQDCHVPRAPAPGEGEGTSWVCRQCVFAIATKRGGALKKGPYARAMLGMKLSLPYGLSNRQQSYCYC

SEQ ID NO: 22848 - protein, 70 aa, Synthetic construct
HAYHQDCHVPRAPAPGEGEGTSWVCRQCVFAIATKRGGALKKGPYARAMLGMKLSLPYGLKGLDWSYCYC

SEQ ID NO: 22849 - protein, 70 aa, Synthetic construct
HAYHQDCHVPRAPAPGEGEGTSWVCRQCVFAIATKRGGALKKGPYARAMLGMKLSLPYGLKGLDWDAGHL

SEQ ID NO: 22850 - protein, 70 aa, Synthetic construct
GAMEHTNSNESDSSPGRSPMQAVHPVHVKEEPLDPEEAEGPLSLVTTANHSPDFDHDRDYEDEPVNEDME

SEQ ID NO: 22851 - protein, 70 aa, Synthetic construct
LASAITNSNESDSSPGRSPMQAVHPVHVKEEPLDPEEAEGPLSLVTTANHSPDFDHDRDYEDEPVNEDME

SEQ ID NO: 22852 - protein, 70 aa, Synthetic construct
LASAIREELNSDSSPGRSPMQAVHPVHVKEEPLDPEEAEGPLSLVTTANHSPDFDHDRDYEDEPVNEDME

SEQ ID NO: 22853 - protein, 70 aa, Synthetic construct
LASAIREELNGAMEHGRSPMQAVHPVHVKEEPLDPEEAEGPLSLVTTANHSPDFDHDRDYEDEPVNEDME

SEQ ID NO: 22854 - protein, 70 aa, Synthetic construct
LASAIREELNGAMEHTNSNEQAVHPVHVKEEPLDPEEAEGPLSLVTTANHSPDFDHDRDYEDEPVNEDME

SEQ ID NO: 22855 - protein, 70 aa, Synthetic construct
LASAIREELNGAMEHTNSNESDSSPVHVKEEPLDPEEAEGPLSLVTTANHSPDFDHDRDYEDEPVNEDME

SEQ ID NO: 22856 - protein, 70 aa, Synthetic construct
LASAIREELNGAMEHTNSNESDSSPGRSPMQAVHPVHVKEEPLDPTTANHSPDFDHDRDYEDEPVNEDME

SEQ ID NO: 22857 - protein, 70 aa, Synthetic construct
LASAIREELNGAMEHTNSNESDSSPGRSPMQAVHPVHVKEEPLDPEEAEGSPDFDHDRDYEDEPVNEDME

SEQ ID NO: 22858 - protein, 70 aa, Synthetic construct
LASAIREELNGAMEHTNSNESDSSPGRSPMQAVHPVHVKEEPLDPEEAEGPLSLVHDRDYEDEPVNEDME

SEQ ID NO: 22859 - protein, 70 aa, Synthetic construct
LASAIREELNGAMEHTNSNESDSSPGRSPMQAVHPVHVKEEPLDPEEAEGPLSLVTTANHEDEPVNEDME

SEQ ID NO: 22860 - protein, 70 aa, Synthetic construct
LASAIREELNGAMEHTNSNESDSSPGRSPMQAVHPVHVKEEPLDPEEAEGPLSLVTTANHSPDFDNEDME

SEQ ID NO: 22861 - protein, 70 aa, Synthetic construct
LASAIREELNGAMEHTNSNESDSSPGRSPMQAVHPVHVKEEPLDPEEAEGPLSLVTTANHSPDFDHDRDY

SEQ ID NO: 22862 - protein, 70 aa, Synthetic construct
TLVPPGRPRGARDSRSLQKTWVGVAPAPLSASILSQKPGRWCAVHVQIAWQIYRHQQKIKEMQLDPHKLE

SEQ ID NO: 22863 - protein, 70 aa, Synthetic construct
TCWEGGRPRGARDSRSLQKTWVGVAPAPLSASILSQKPGRWCAVHVQIAWQIYRHQQKIKEMQLDPHKLE

SEQ ID NO: 22864 - protein, 70 aa, Synthetic construct
TCWEGPWQGRARDSRSLQKTWVGVAPAPLSASILSQKPGRWCAVHVQIAWQIYRHQQKIKEMQLDPHKLE

SEQ ID NO: 22865 - protein, 70 aa, Synthetic construct
TCWEGPWQGRTLVPPSLQKTWVGVAPAPLSASILSQKPGRWCAVHVQIAWQIYRHQQKIKEMQLDPHKLE

SEQ ID NO: 22866 - protein, 70 aa, Synthetic construct
TCWEGPWQGRTLVPPGRPRGWVGVAPAPLSASILSQKPGRWCAVHVQIAWQIYRHQQKIKEMQLDPHKLE

SEQ ID NO: 22867 - protein, 70 aa, Synthetic construct
TCWEGPWQGRTLVPPGRPRGARDSRPAPLSASILSQKPGRWCAVHVQIAWQIYRHQQKIKEMQLDPHKLE

SEQ ID NO: 22868 - protein, 70 aa, Synthetic construct
TCWEGPWQGRTLVPPGRPRGARDSRSLQKTASILSQKPGRWCAVHVQIAWQIYRHQQKIKEMQLDPHKLE

SEQ ID NO: 22869 - protein, 70 aa, Synthetic construct
TCWEGPWQGRTLVPPGRPRGARDSRSLQKTWVGVAQKPGRWCAVHVQIAWQIYRHQQKIKEMQLDPHKLE

SEQ ID NO: 22870 - protein, 70 aa, Synthetic construct
TCWEGPWQGRTLVPPGRPRGARDSRSLQKTWVGVAPAPLSASILSQKPGRWCAVHVQIAWQIYRHQQKIK

SEQ ID NO: 22871 - protein, 70 aa, Synthetic construct
HDPGMPASKKMQGERGGGAALKENVCQNCEKLGELLLCEAQCCGAFHLECLGLTEMPRGKFICNECRTGI

SEQ ID NO: 22872 - protein, 70 aa, Synthetic construct
PKETVPASKKMQGERGGGAALKENVCQNCEKLGELLLCEAQCCGAFHLECLGLTEMPRGKFICNECRTGI

SEQ ID NO: 22873 - protein, 70 aa, Synthetic construct
PKETVEEGVEMQGERGGGAALKENVCQNCEKLGELLLCEAQCCGAFHLECLGLTEMPRGKFICNECRTGI

SEQ ID NO: 22874 - protein, 70 aa, Synthetic construct
PKETVEEGVEHDPGMGGGAALKENVCQNCEKLGELLLCEAQCCGAFHLECLGLTEMPRGKFICNECRTGI

SEQ ID NO: 22875 - protein, 70 aa, Synthetic construct
PKETVEEGVEHDPGMPASKKLKENVCQNCEKLGELLLCEAQCCGAFHLECLGLTEMPRGKFICNECRTGI

SEQ ID NO: 22876 - protein, 70 aa, Synthetic construct
PKETVEEGVEHDPGMPASKKMQGERCQNCEKLGELLLCEAQCCGAFHLECLGLTEMPRGKFICNECRTGI

SEQ ID NO: 22877 - protein, 70 aa, Synthetic construct
PKETVEEGVEHDPGMPASKKMQGERGGGAAKLGELLLCEAQCCGAFHLECLGLTEMPRGKFICNECRTGI

SEQ ID NO: 22878 - protein, 70 aa, Synthetic construct
PKETVEEGVEHDPGMPASKKMQGERGGGAALKENVLLCEAQCCGAFHLECLGLTEMPRGKFICNECRTGI

SEQ ID NO: 22879 - protein, 70 aa, Synthetic construct
PKETVEEGVEHDPGMPASKKMQGERGGGAALKENVCQNCEKLGELLLCEAQCCGAFHLECFICNECRTGI

SEQ ID NO: 22880 - protein, 70 aa, Synthetic construct
LGLTEMPRGKFICNECRTGIHTCFVCKQSGEDVKRCLLPLCGKFYHEECVQKYPPTVMQNKGFRCSLHIC

SEQ ID NO: 22881 - protein, 70 aa, Synthetic construct
QCCGAMPRGKFICNECRTGIHTCFVCKQSGEDVKRCLLPLCGKFYHEECVQKYPPTVMQNKGFRCSLHIC

SEQ ID NO: 22882 - protein, 70 aa, Synthetic construct
QCCGAFHLECFICNECRTGIHTCFVCKQSGEDVKRCLLPLCGKFYHEECVQKYPPTVMQNKGFRCSLHIC

SEQ ID NO: 22883 - protein, 70 aa, Synthetic construct
QCCGAFHLECLGLTECRTGIHTCFVCKQSGEDVKRCLLPLCGKFYHEECVQKYPPTVMQNKGFRCSLHIC

SEQ ID NO: 22884 - protein, 70 aa, Synthetic construct
QCCGAFHLECLGLTEMPRGKHTCFVCKQSGEDVKRCLLPLCGKFYHEECVQKYPPTVMQNKGFRCSLHIC

SEQ ID NO: 22885 - protein, 70 aa, Synthetic construct
QCCGAFHLECLGLTEMPRGKFICNECKQSGEDVKRCLLPLCGKFYHEECVQKYPPTVMQNKGFRCSLHIC

SEQ ID NO: 22886 - protein, 70 aa, Synthetic construct
QCCGAFHLECLGLTEMPRGKFICNECRTGIEDVKRCLLPLCGKFYHEECVQKYPPTVMQNKGFRCSLHIC

SEQ ID NO: 22887 - protein, 70 aa, Synthetic construct
QCCGAFHLECLGLTEMPRGKFICNECRTGIHTCFVCLLPLCGKFYHEECVQKYPPTVMQNKGFRCSLHIC

SEQ ID NO: 22888 - protein, 70 aa, Synthetic construct
QCCGAFHLECLGLTEMPRGKFICNECRTGIHTCFVCKQSGCGKFYHEECVQKYPPTVMQNKGFRCSLHIC

SEQ ID NO: 22889 - protein, 70 aa, Synthetic construct
QCCGAFHLECLGLTEMPRGKFICNECRTGIHTCFVCKQSGEDVKRHEECVQKYPPTVMQNKGFRCSLHIC

SEQ ID NO: 22890 - protein, 70 aa, Synthetic construct
QCCGAFHLECLGLTEMPRGKFICNECRTGIHTCFVCKQSGEDVKRCLLPLQKYPPTVMQNKGFRCSLHIC

SEQ ID NO: 22891 - protein, 70 aa, Synthetic construct
QCCGAFHLECLGLTEMPRGKFICNECRTGIHTCFVCKQSGEDVKRCLLPLCGKFYTVMQNKGFRCSLHIC

SEQ ID NO: 22892 - protein, 70 aa, Synthetic construct
QCCGAFHLECLGLTEMPRGKFICNECRTGIHTCFVCKQSGEDVKRCLLPLCGKFYHEECVKGFRCSLHIC

SEQ ID NO: 22893 - protein, 70 aa, Synthetic construct
QCCGAFHLECLGLTEMPRGKFICNECRTGIHTCFVCKQSGEDVKRCLLPLCGKFYHEECVQKYPPSLHIC

SEQ ID NO: 22894 - protein, 70 aa, Synthetic construct
QCCGAFHLECLGLTEMPRGKFICNECRTGIHTCFVCKQSGEDVKRCLLPLCGKFYHEECVQKYPPTVMQN

SEQ ID NO: 22895 - protein, 70 aa, Synthetic construct
RVSPAGGTLDDKPKEQLQRSLPKATETDCNDKCSHNTEVGETRSSTPEMPAVSAFFSLAALAEVAAMENV

SEQ ID NO: 22896 - protein, 70 aa, Synthetic construct
ITHLVGGTLDDKPKEQLQRSLPKATETDCNDKCSHNTEVGETRSSTPEMPAVSAFFSLAALAEVAAMENV

SEQ ID NO: 22897 - protein, 70 aa, Synthetic construct
ITHLVRTADGDKPKEQLQRSLPKATETDCNDKCSHNTEVGETRSSTPEMPAVSAFFSLAALAEVAAMENV

SEQ ID NO: 22898 - protein, 70 aa, Synthetic construct
ITHLVRTADGRVSPAGGTLDDKPKEETDCNDKCSHNTEVGETRSSTPEMPAVSAFFSLAALAEVAAMENV

SEQ ID NO: 22899 - protein, 70 aa, Synthetic construct
ITHLVRTADGRVSPAGGTLDDKPKEQLQRSDKCSHNTEVGETRSSTPEMPAVSAFFSLAALAEVAAMENV

SEQ ID NO: 22900 - protein, 70 aa, Synthetic construct
ITHLVRTADGRVSPAGGTLDDKPKEQLQRSLPKATNTEVGETRSSTPEMPAVSAFFSLAALAEVAAMENV

SEQ ID NO: 22901 - protein, 70 aa, Synthetic construct
ITHLVRTADGRVSPAGGTLDDKPKEQLQRSLPKATETDCNETRSSTPEMPAVSAFFSLAALAEVAAMENV

SEQ ID NO: 22902 - protein, 70 aa, Synthetic construct
ITHLVRTADGRVSPAGGTLDDKPKEQLQRSLPKATETDCNDKCSHTPEMPAVSAFFSLAALAEVAAMENV

SEQ ID NO: 22903 - protein, 70 aa, Synthetic construct
RRRRGHSLRRSRRVKANDRERNRMHNLNAALDALRSVLPSFPDDTKLTKIETLRFAYNYIWALAETLRLA

SEQ ID NO: 22904 - protein, 70 aa, Synthetic construct
RRRRGRTRVRSRRVKANDRERNRMHNLNAALDALRSVLPSFPDDTKLTKIETLRFAYNYIWALAETLRLA

SEQ ID NO: 22905 - protein, 70 aa, Synthetic construct
RRRRGRTRVRSEALLHSLRRSRRVKNLNAALDALRSVLPSFPDDTKLTKIETLRFAYNYIWALAETLRLA

SEQ ID NO: 22906 - protein, 70 aa, Synthetic construct
RRRRGRTRVRSEALLHSLRRSRRVKANDRERNRMHNLNAALDALRKLTKIETLRFAYNYIWALAETLRLA

SEQ ID NO: 22907 - protein, 70 aa, Synthetic construct
ARWTVDEVAEFVQSLLGCEEHAKCFKKEQIDGKAFLLLTQTDIVKVMKIKLGPALKIYNSILMFRHSQEL

SEQ ID NO: 22908 - protein, 70 aa, Synthetic construct
HAQKVQPPVELFVDWLAVGHVDEFLSFVPAPDGKGFRMLLASPGACGHGRALLFQGVVDDEQVKTISINQ

SEQ ID NO: 22909 - protein, 70 aa, Synthetic construct
HAQKVQPPVELFVDWLAVGHVDEFLSFVPAPDGKGFRMLLASPGACFKLFQEKQKGVVDDEQVKTISINQ

SEQ ID NO: 22910 - protein, 70 aa, Synthetic construct
HAQKVQPPVELFVDWLAVGHVDEFLSFVPAPDGKGFRMLLASPGACFKLFQEKQKCGHGREQVKTISINQ

SEQ ID NO: 22911 - protein, 70 aa, Synthetic construct
HAQKVQPPVELFVDWLAVGHVDEFLSFVPAPDGKGFRMLLASPGACFKLFQEKQKCGHGRALLFQISINQ

SEQ ID NO: 22912 - protein, 70 aa, Synthetic construct
HAQKVQPPVELFVDWLAVGHVDEFLSFVPAPDGKGFRMLLASPGACFKLFQEKQKCGHGRALLFQGVVDD

SEQ ID NO: 22913 - protein, 70 aa, Synthetic construct
SWIETPPSIKSLDSNDSGVYTSACKRRRLSPSNSSNENSPSIKCEDINAEEYSKDTSKGMGGYYAFYTTP

SEQ ID NO: 22914 - protein, 70 aa, Synthetic construct
KEKVKPPSIKSLDSNDSGVYTSACKRRRLSPSNSSNENSPSIKCEDINAEEYSKDTSKGMGGYYAFYTTP

SEQ ID NO: 22915 - protein, 70 aa, Synthetic construct
KEKVKEEIGSSLDSNDSGVYTSACKRRRLSPSNSSNENSPSIKCEDINAEEYSKDTSKGMGGYYAFYTTP

SEQ ID NO: 22916 - protein, 70 aa, Synthetic construct
KEKVKEEIGSSWIETDSGVYTSACKRRRLSPSNSSNENSPSIKCEDINAEEYSKDTSKGMGGYYAFYTTP

SEQ ID NO: 22917 - protein, 70 aa, Synthetic construct
KEKVKEEIGSSWIETPPSIKTSACKRRRLSPSNSSNENSPSIKCEDINAEEYSKDTSKGMGGYYAFYTTP

SEQ ID NO: 22918 - protein, 70 aa, Synthetic construct
KEKVKEEIGSSWIETPPSIKSLDSNRRRLSPSNSSNENSPSIKCEDINAEEYSKDTSKGMGGYYAFYTTP

SEQ ID NO: 22919 - protein, 70 aa, Synthetic construct
KEKVKEEIGSSWIETPPSIKSLDSNDSGVYPSNSSNENSPSIKCEDINAEEYSKDTSKGMGGYYAFYTTP

SEQ ID NO: 22920 - protein, 70 aa, Synthetic construct
KEKVKEEIGSSWIETPPSIKSLDSNDSGVYTSACKNENSPSIKCEDINAEEYSKDTSKGMGGYYAFYTTP

SEQ ID NO: 22921 - protein, 70 aa, Synthetic construct
KEKVKEEIGSSWIETPPSIKSLDSNDSGVYTSACKRRRLSSIKCEDINAEEYSKDTSKGMGGYYAFYTTP

SEQ ID NO: 22922 - protein, 70 aa, Synthetic construct
KEKVKEEIGSSWIETPPSIKSLDSNDSGVYTSACKRRRLSPSNSSDINAEEYSKDTSKGMGGYYAFYTTP

SEQ ID NO: 22923 - protein, 70 aa, Synthetic construct
KEKVKEEIGSSWIETPPSIKSLDSNDSGVYTSACKRRRLSPSNSSNENSPEYSKDTSKGMGGYYAFYTTP

SEQ ID NO: 22924 - protein, 70 aa, Synthetic construct
KEKVKEEIGSSWIETPPSIKSLDSNDSGVYTSACKRRRLSPSNSSNENSPSIKCETSKGMGGYYAFYTTP

SEQ ID NO: 22925 - protein, 70 aa, Synthetic construct
KEKVKEEIGSSWIETPPSIKSLDSNDSGVYTSACKRRRLSPSNSSNENSPSIKCEDINAEGGYYAFYTTP

SEQ ID NO: 22926 - protein, 70 aa, Synthetic construct
KEKVKEEIGSSWIETPPSIKSLDSNDSGVYTSACKRRRLSPSNSSNENSPSIKCEDINAEEYSKDFYTTP

SEQ ID NO: 22927 - protein, 70 aa, Synthetic construct
KEKVKEEIGSSWIETPPSIKSLDSNDSGVYTSACKRRRLSPSNSSNENSPSIKCEDINAEEYSKDTSKGM

SEQ ID NO: 22928 - protein, 70 aa, Synthetic construct
RRFYTRKDVRRHMVVHTGRKDFLCQYCAQRFGRKDHLTRHMKKSHNQELLKVKTEPVDFLDPFTCNVSVP

SEQ ID NO: 22929 - protein, 70 aa, Synthetic construct
EKKHQRKDVRRHMVVHTGRKDFLCQYCAQRFGRKDHLTRHMKKSHNQELLKVKTEPVDFLDPFTCNVSVP

SEQ ID NO: 22930 - protein, 70 aa, Synthetic construct
EKKHQCEHCDRHMVVHTGRKDFLCQYCAQRFGRKDHLTRHMKKSHNQELLKVKTEPVDFLDPFTCNVSVP

SEQ ID NO: 22931 - protein, 70 aa, Synthetic construct
EKKHQCEHCDRRFYTHTGRKDFLCQYCAQRFGRKDHLTRHMKKSHNQELLKVKTEPVDFLDPFTCNVSVP

SEQ ID NO: 22932 - protein, 70 aa, Synthetic construct
EKKHQCEHCDRRFYTRKDVRDFLCQYCAQRFGRKDHLTRHMKKSHNQELLKVKTEPVDFLDPFTCNVSVP

SEQ ID NO: 22933 - protein, 70 aa, Synthetic construct
EKKHQCEHCDRRFYTRKDVRRHMVVYCAQRFGRKDHLTRHMKKSHNQELLKVKTEPVDFLDPFTCNVSVP

SEQ ID NO: 22934 - protein, 70 aa, Synthetic construct
EKKHQCEHCDRRFYTRKDVRRHMVVHTGRKDFLCQHLTRHMKKSHNQELLKVKTEPVDFLDPFTCNVSVP

SEQ ID NO: 22935 - protein, 70 aa, Synthetic construct
EKKHQCEHCDRRFYTRKDVRRHMVVHTGRKDFLCQYCAQRMKKSHNQELLKVKTEPVDFLDPFTCNVSVP

SEQ ID NO: 22936 - protein, 70 aa, Synthetic construct
EKKHQCEHCDRRFYTRKDVRRHMVVHTGRKDFLCQYCAQRFGRKDNQELLKVKTEPVDFLDPFTCNVSVP

SEQ ID NO: 22937 - protein, 70 aa, Synthetic construct
EKKHQCEHCDRRFYTRKDVRRHMVVHTGRKDFLCQYCAQRFGRKDHLTRHKVKTEPVDFLDPFTCNVSVP

SEQ ID NO: 22938 - protein, 70 aa, Synthetic construct
EKKHQCEHCDRRFYTRKDVRRHMVVHTGRKDFLCQYCAQRFGRKDHLTRHMKKSHPVDFLDPFTCNVSVP

SEQ ID NO: 22939 - protein, 70 aa, Synthetic construct
EKKHQCEHCDRRFYTRKDVRRHMVVHTGRKDFLCQYCAQRFGRKDHLTRHMKKSHNQELLDPFTCNVSVP

SEQ ID NO: 22940 - protein, 70 aa, Synthetic construct
EKKHQCEHCDRRFYTRKDVRRHMVVHTGRKDFLCQYCAQRFGRKDHLTRHMKKSHNQELLKVKTENVSVP

SEQ ID NO: 22941 - protein, 70 aa, Synthetic construct
MKKSHNQELLKVKTEPVDFLDPFTCNVSVPIKDELLPVMSLPSSELLSKPFTNTLQLNLYNTPFQSMQSS

SEQ ID NO: 22942 - protein, 70 aa, Synthetic construct
FGRKDNQELLKVKTEPVDFLDPFTCNVSVPIKDELLPVMSLPSSELLSKPFTNTLQLNLYNTPFQSMQSS

SEQ ID NO: 22943 - protein, 70 aa, Synthetic construct
FGRKDHLTRHKVKTEPVDFLDPFTCNVSVPIKDELLPVMSLPSSELLSKPFTNTLQLNLYNTPFQSMQSS

SEQ ID NO: 22944 - protein, 70 aa, Synthetic construct
FGRKDHLTRHMKKSHNQELLKVKTENVSVPIKDELLPVMSLPSSELLSKPFTNTLQLNLYNTPFQSMQSS

SEQ ID NO: 22945 - protein, 70 aa, Synthetic construct
FGRKDHLTRHMKKSHNQELLKVKTEPVDFLIKDELLPVMSLPSSELLSKPFTNTLQLNLYNTPFQSMQSS

SEQ ID NO: 22946 - protein, 70 aa, Synthetic construct
FGRKDHLTRHMKKSHNQELLKVKTEPVDFLDPFTCLPVMSLPSSELLSKPFTNTLQLNLYNTPFQSMQSS

SEQ ID NO: 22947 - protein, 70 aa, Synthetic construct
FGRKDHLTRHMKKSHNQELLKVKTEPVDFLDPFTCNVSVPLPSSELLSKPFTNTLQLNLYNTPFQSMQSS

SEQ ID NO: 22948 - protein, 70 aa, Synthetic construct
FGRKDHLTRHMKKSHNQELLKVKTEPVDFLDPFTCNVSVPIKDELLLSKPFTNTLQLNLYNTPFQSMQSS

SEQ ID NO: 22949 - protein, 70 aa, Synthetic construct
FGRKDHLTRHMKKSHNQELLKVKTEPVDFLDPFTCNVSVPIKDELLPVMSFTNTLQLNLYNTPFQSMQSS

SEQ ID NO: 22950 - protein, 70 aa, Synthetic construct
FGRKDHLTRHMKKSHNQELLKVKTEPVDFLDPFTCNVSVPIKDELLPVMSLPSSEQLNLYNTPFQSMQSS

SEQ ID NO: 22951 - protein, 70 aa, Synthetic construct
FGRKDHLTRHMKKSHNQELLKVKTEPVDFLDPFTCNVSVPIKDELLPVMSLPSSELLSKPNTPFQSMQSS

SEQ ID NO: 22952 - protein, 70 aa, Synthetic construct
FGRKDHLTRHMKKSHNQELLKVKTEPVDFLDPFTCNVSVPIKDELLPVMSLPSSELLSKPFTNTLSMQSS

SEQ ID NO: 22953 - protein, 70 aa, Synthetic construct
TVPATNYNHHLVGASSCIEEFQSQFIFEHSYSVMDSPKKLKHKLDHVIGELEDTKESLRNVLDREKRFQK

SEQ ID NO: 22954 - protein, 70 aa, Synthetic construct
LHCRKNFTLKLVGASSCIEEFQSQFIFEHSYSVMDSPKKLKHKLDHVIGELEDTKESLRNVLDREKRFQK

SEQ ID NO: 22955 - protein, 70 aa, Synthetic construct
LHCRKNFTLKTVPATSCIEEFQSQFIFEHSYSVMDSPKKLKHKLDHVIGELEDTKESLRNVLDREKRFQK

SEQ ID NO: 22956 - protein, 70 aa, Synthetic construct
LHCRKNFTLKTVPATNYNHHFQSQFIFEHSYSVMDSPKKLKHKLDHVIGELEDTKESLRNVLDREKRFQK

SEQ ID NO: 22957 - protein, 70 aa, Synthetic construct
LHCRKNFTLKTVPATNYNHHLVGASIFEHSYSVMDSPKKLKHKLDHVIGELEDTKESLRNVLDREKRFQK

SEQ ID NO: 22958 - protein, 70 aa, Synthetic construct
LHCRKNFTLKTVPATNYNHHLVGASSCIEEFQSQFSPKKLKHKLDHVIGELEDTKESLRNVLDREKRFQK

SEQ ID NO: 22959 - protein, 70 aa, Synthetic construct
LHCRKNFTLKTVPATNYNHHLVGASSCIEEFQSQFIFEHSKHKLDHVIGELEDTKESLRNVLDREKRFQK

SEQ ID NO: 22960 - protein, 70 aa, Synthetic construct
LHCRKNFTLKTVPATNYNHHLVGASSCIEEFQSQFIFEHSYSVMDHVIGELEDTKESLRNVLDREKRFQK

SEQ ID NO: 22961 - protein, 70 aa, Synthetic construct
LHCRKNFTLKTVPATNYNHHLVGASSCIEEFQSQFIFEHSYSVMDSPKKLLEDTKESLRNVLDREKRFQK

SEQ ID NO: 22962 - protein, 70 aa, Synthetic construct
LHCRKNFTLKTVPATNYNHHLVGASSCIEEFQSQFIFEHSYSVMDSPKKLKHKLDHVIGELEDTKESLRN

SEQ ID NO: 22963 - protein, 70 aa, Synthetic construct
LPVATTTAQPTFPCPDCGKTFGQAVSLRRHRQMHEVRAPPGTFACTECGQDFAQEAGLHQHYIRHARGEL

SEQ ID NO: 22964 - protein, 70 aa, Synthetic construct
RSHGPTTAQPTFPCPDCGKTFGQAVSLRRHRQMHEVRAPPGTFACTECGQDFAQEAGLHQHYIRHARGEL

SEQ ID NO: 22965 - protein, 70 aa, Synthetic construct
RSHGPAAKPTTFPCPDCGKTFGQAVSLRRHRQMHEVRAPPGTFACTECGQDFAQEAGLHQHYIRHARGEL

SEQ ID NO: 22966 - protein, 70 aa, Synthetic construct
RSHGPAAKPTLPVATDCGKTFGQAVSLRRHRQMHEVRAPPGTFACTECGQDFAQEAGLHQHYIRHARGEL

SEQ ID NO: 22967 - protein, 70 aa, Synthetic construct
RSHGPAAKPTLPVATTTAQPFGQAVSLRRHRQMHEVRAPPGTFACTECGQDFAQEAGLHQHYIRHARGEL

SEQ ID NO: 22968 - protein, 70 aa, Synthetic construct
RSHGPAAKPTLPVATTTAQPTFPCPSLRRHRQMHEVRAPPGTFACTECGQDFAQEAGLHQHYIRHARGEL

SEQ ID NO: 22969 - protein, 70 aa, Synthetic construct
RSHGPAAKPTLPVATTTAQPTFPCPDCGKTRQMHEVRAPPGTFACTECGQDFAQEAGLHQHYIRHARGEL

SEQ ID NO: 22970 - protein, 70 aa, Synthetic construct
RSHGPAAKPTLPVATTTAQPTFPCPDCGKTFGQAVVRAPPGTFACTECGQDFAQEAGLHQHYIRHARGEL

SEQ ID NO: 22971 - protein, 70 aa, Synthetic construct
RSHGPAAKPTLPVATTTAQPTFPCPDCGKTFGQAVSLRRHGTFACTECGQDFAQEAGLHQHYIRHARGEL

SEQ ID NO: 22972 - protein, 70 aa, Synthetic construct
QPSPDQSGLDMTGIKQIKQEPIYDLTSVPNLFTYSSFNNGQLAPGITMTEIDRIAQNIIKSHLETCQYTM

SEQ ID NO: 22973 - protein, 70 aa, Synthetic construct
SEGYYQSGLDMTGIKQIKQEPIYDLTSVPNLFTYSSFNNGQLAPGITMTEIDRIAQNIIKSHLETCQYTM

SEQ ID NO: 22974 - protein, 70 aa, Synthetic construct
SEGYYNVDSGMTGIKQIKQEPIYDLTSVPNLFTYSSFNNGQLAPGITMTEIDRIAQNIIKSHLETCQYTM

SEQ ID NO: 22975 - protein, 70 aa, Synthetic construct
SEGYYNVDSGQPSPDQIKQEPIYDLTSVPNLFTYSSFNNGQLAPGITMTEIDRIAQNIIKSHLETCQYTM

SEQ ID NO: 22976 - protein, 70 aa, Synthetic construct
SEGYYNVDSGQPSPDQSGLDMTGIKQIKQELFTYSSFNNGQLAPGITMTEIDRIAQNIIKSHLETCQYTM

SEQ ID NO: 22977 - protein, 70 aa, Synthetic construct
SEGYYNVDSGQPSPDQSGLDMTGIKQIKQEPIYDLSFNNGQLAPGITMTEIDRIAQNIIKSHLETCQYTM

SEQ ID NO: 22978 - protein, 70 aa, Synthetic construct
SEGYYNVDSGQPSPDQSGLDMTGIKQIKQEPIYDLTSVPNQLAPGITMTEIDRIAQNIIKSHLETCQYTM

SEQ ID NO: 22979 - protein, 70 aa, Synthetic construct
SEGYYNVDSGQPSPDQSGLDMTGIKQIKQEPIYDLTSVPNLFTYSITMTEIDRIAQNIIKSHLETCQYTM

SEQ ID NO: 22980 - protein, 70 aa, Synthetic construct
SEGYYNVDSGQPSPDQSGLDMTGIKQIKQEPIYDLTSVPNLFTYSSFNNGIDRIAQNIIKSHLETCQYTM

SEQ ID NO: 22981 - protein, 70 aa, Synthetic construct
SEGYYNVDSGQPSPDQSGLDMTGIKQIKQEPIYDLTSVPNLFTYSSFNNGQLAPGQNIIKSHLETCQYTM

SEQ ID NO: 22982 - protein, 70 aa, Synthetic construct
SEGYYNVDSGQPSPDQSGLDMTGIKQIKQEPIYDLTSVPNLFTYSSFNNGQLAPGITMTESHLETCQYTM

SEQ ID NO: 22983 - protein, 70 aa, Synthetic construct
SEGYYNVDSGQPSPDQSGLDMTGIKQIKQEPIYDLTSVPNLFTYSSFNNGQLAPGITMTEIDRIACQYTM

SEQ ID NO: 22984 - protein, 70 aa, Synthetic construct
SEGYYNVDSGQPSPDQSGLDMTGIKQIKQEPIYDLTSVPNLFTYSSFNNGQLAPGITMTEIDRIAQNIIK

SEQ ID NO: 22985 - protein, 70 aa, Synthetic construct
TEQLDGSTWDFCSEDCKSKYLLWYCKAARCHACKRQGKLLETIHWRGQIRHFCNQQCLLRFYSQQNQPNL

SEQ ID NO: 22986 - protein, 70 aa, Synthetic construct
YCSQTGSTWDFCSEDCKSKYLLWYCKAARCHACKRQGKLLETIHWRGQIRHFCNQQCLLRFYSQQNQPNL

SEQ ID NO: 22987 - protein, 70 aa, Synthetic construct
YCSQTCQRGVFCSEDCKSKYLLWYCKAARCHACKRQGKLLETIHWRGQIRHFCNQQCLLRFYSQQNQPNL

SEQ ID NO: 22988 - protein, 70 aa, Synthetic construct
YCSQTCQRGVTEQLDCKSKYLLWYCKAARCHACKRQGKLLETIHWRGQIRHFCNQQCLLRFYSQQNQPNL

SEQ ID NO: 22989 - protein, 70 aa, Synthetic construct
YCSQTCQRGVTEQLDGSTWDFCSEDCKSKYHACKRQGKLLETIHWRGQIRHFCNQQCLLRFYSQQNQPNL

SEQ ID NO: 22990 - protein, 70 aa, Synthetic construct
YCSQTCQRGVTEQLDGSTWDFCSEDCKSKYLLWYCQGKLLETIHWRGQIRHFCNQQCLLRFYSQQNQPNL

SEQ ID NO: 22991 - protein, 70 aa, Synthetic construct
YCSQTCQRGVTEQLDGSTWDFCSEDCKSKYLLWYCKAARCETIHWRGQIRHFCNQQCLLRFYSQQNQPNL

SEQ ID NO: 22992 - protein, 70 aa, Synthetic construct
YCSQTCQRGVTEQLDGSTWDFCSEDCKSKYLLWYCKAARCHACKRRGQIRHFCNQQCLLRFYSQQNQPNL

SEQ ID NO: 22993 - protein, 70 aa, Synthetic construct
YCSQTCQRGVTEQLDGSTWDFCSEDCKSKYLLWYCKAARCHACKRQGKLLHFCNQQCLLRFYSQQNQPNL

SEQ ID NO: 22994 - protein, 70 aa, Synthetic construct
YCSQTCQRGVTEQLDGSTWDFCSEDCKSKYLLWYCKAARCHACKRQGKLLETIHWQCLLRFYSQQNQPNL

SEQ ID NO: 22995 - protein, 70 aa, Synthetic construct
YCSQTCQRGVTEQLDGSTWDFCSEDCKSKYLLWYCKAARCHACKRQGKLLETIHWRGQIRFYSQQNQPNL

SEQ ID NO: 22996 - protein, 70 aa, Synthetic construct
YCSQTCQRGVTEQLDGSTWDFCSEDCKSKYLLWYCKAARCHACKRQGKLLETIHWRGQIRHFCNQNQPNL

SEQ ID NO: 22997 - protein, 70 aa, Synthetic construct
YCSQTCQRGVTEQLDGSTWDFCSEDCKSKYLLWYCKAARCHACKRQGKLLETIHWRGQIRHFCNQQCLLR

SEQ ID NO: 22998 - protein, 70 aa, Synthetic construct
ETIHWRGQIRHFCNQQCLLRFYSQQNQPNLDTQSGPESLLNSQSPESKPQTPSQTKVENSNTVRTPEENG

SEQ ID NO: 22999 - protein, 70 aa, Synthetic construct
HACKRRGQIRHFCNQQCLLRFYSQQNQPNLDTQSGPESLLNSQSPESKPQTPSQTKVENSNTVRTPEENG

SEQ ID NO: 23000 - protein, 70 aa, Synthetic construct
HACKRQGKLLHFCNQQCLLRFYSQQNQPNLDTQSGPESLLNSQSPESKPQTPSQTKVENSNTVRTPEENG

SEQ ID NO: 23001 - protein, 70 aa, Synthetic construct
HACKRQGKLLETIHWRGQIRHFCNQQCLLRFYSQQNQPNLDTQSGESKPQTPSQTKVENSNTVRTPEENG

SEQ ID NO: 23002 - protein, 70 aa, Synthetic construct
HACKRQGKLLETIHWRGQIRHFCNQQCLLRFYSQQNQPNLDTQSGPESLLTPSQTKVENSNTVRTPEENG

SEQ ID NO: 23003 - protein, 70 aa, Synthetic construct
HACKRQGKLLETIHWRGQIRHFCNQQCLLRFYSQQNQPNLDTQSGPESLLNSQSPKVENSNTVRTPEENG

SEQ ID NO: 23004 - protein, 70 aa, Synthetic construct
HACKRQGKLLETIHWRGQIRHFCNQQCLLRFYSQQNQPNLDTQSGPESLLNSQSPESKPQNTVRTPEENG

SEQ ID NO: 23005 - protein, 70 aa, Synthetic construct
HACKRQGKLLETIHWRGQIRHFCNQQCLLRFYSQQNQPNLDTQSGPESLLNSQSPESKPQTPSQTPEENG

SEQ ID NO: 23006 - protein, 70 aa, Synthetic construct
HACKRQGKLLETIHWRGQIRHFCNQQCLLRFYSQQNQPNLDTQSGPESLLNSQSPESKPQTPSQTKVENS

SEQ ID NO: 23007 - protein, 70 aa, Synthetic construct
APKKKHRRNRTTFTTYQLHQLERAFEASHYPDVYSREELAAKVHLPEVRVQVWFQNRRAKWRRQERLESG

SEQ ID NO: 23008 - protein, 70 aa, Synthetic construct
RYSKDTGLMSCGWCQKTPADGGSVDLPPVGHDELSRGTRNYKKTLLLRHHVSTEHKLHEANAQESEIPSE

SEQ ID NO: 23009 - protein, 70 aa, Synthetic construct
TSWLKTGLMSCGWCQKTPADGGSVDLPPVGHDELSRGTRNYKKTLLLRHHVSTEHKLHEANAQESEIPSE

SEQ ID NO: 23010 - protein, 70 aa, Synthetic construct
TSWLKDFPWLCGWCQKTPADGGSVDLPPVGHDELSRGTRNYKKTLLLRHHVSTEHKLHEANAQESEIPSE

SEQ ID NO: 23011 - protein, 70 aa, Synthetic construct
TSWLKDFPWLRYSKDKTPADGGSVDLPPVGHDELSRGTRNYKKTLLLRHHVSTEHKLHEANAQESEIPSE

SEQ ID NO: 23012 - protein, 70 aa, Synthetic construct
TSWLKDFPWLRYSKDTGLMSGGSVDLPPVGHDELSRGTRNYKKTLLLRHHVSTEHKLHEANAQESEIPSE

SEQ ID NO: 23013 - protein, 70 aa, Synthetic construct
TSWLKDFPWLRYSKDTGLMSCGWCQLPPVGHDELSRGTRNYKKTLLLRHHVSTEHKLHEANAQESEIPSE

SEQ ID NO: 23014 - protein, 70 aa, Synthetic construct
TSWLKDFPWLRYSKDTGLMSCGWCQKTPADHDELSRGTRNYKKTLLLRHHVSTEHKLHEANAQESEIPSE

SEQ ID NO: 23015 - protein, 70 aa, Synthetic construct
TSWLKDFPWLRYSKDTGLMSCGWCQKTPADGGSVDRGTRNYKKTLLLRHHVSTEHKLHEANAQESEIPSE

SEQ ID NO: 23016 - protein, 70 aa, Synthetic construct
TSWLKDFPWLRYSKDTGLMSCGWCQKTPADGGSVDLPPVGYKKTLLLRHHVSTEHKLHEANAQESEIPSE

SEQ ID NO: 23017 - protein, 70 aa, Synthetic construct
TSWLKDFPWLRYSKDTGLMSCGWCQKTPADGGSVDLPPVGHDELSRGTRNYKKTLLLRHHNAQESEIPSE

SEQ ID NO: 23018 - protein, 70 aa, Synthetic construct
TSWLKDFPWLRYSKDTGLMSCGWCQKTPADGGSVDLPPVGHDELSRGTRNYKKTLLLRHHVSTEHEIPSE

SEQ ID NO: 23019 - protein, 70 aa, Synthetic construct
TSWLKDFPWLRYSKDTGLMSCGWCQKTPADGGSVDLPPVGHDELSRGTRNYKKTLLLRHHVSTEHKLHEA

SEQ ID NO: 23020 - protein, 70 aa, Synthetic construct
NTLLIKEEPDLDGALLSGPDGDRNVNANLLAEAGTSQDGGDAGTSHDFKYGLMPGPSNDFKYGLIPGTSN

SEQ ID NO: 23021 - protein, 70 aa, Synthetic construct
MQPPVKEEPDLDGALLSGPDGDRNVNANLLAEAGTSQDGGDAGTSHDFKYGLMPGPSNDFKYGLIPGTSN

SEQ ID NO: 23022 - protein, 70 aa, Synthetic construct
MQPPVAYPEENTLLIKEEPDGDRNVNANLLAEAGTSQDGGDAGTSHDFKYGLMPGPSNDFKYGLIPGTSN

SEQ ID NO: 23023 - protein, 70 aa, Synthetic construct
MQPPVAYPEENTLLIKEEPDLDGALNANLLAEAGTSQDGGDAGTSHDFKYGLMPGPSNDFKYGLIPGTSN

SEQ ID NO: 23024 - protein, 70 aa, Synthetic construct
MQPPVAYPEENTLLIKEEPDLDGALLSGPDAEAGTSQDGGDAGTSHDFKYGLMPGPSNDFKYGLIPGTSN

SEQ ID NO: 23025 - protein, 70 aa, Synthetic construct
MQPPVAYPEENTLLIKEEPDLDGALLSGPDGDRNVSQDGGDAGTSHDFKYGLMPGPSNDFKYGLIPGTSN

SEQ ID NO: 23026 - protein, 70 aa, Synthetic construct
MQPPVAYPEENTLLIKEEPDLDGALLSGPDGDRNVNANLLDAGTSHDFKYGLMPGPSNDFKYGLIPGTSN

SEQ ID NO: 23027 - protein, 70 aa, Synthetic construct
MQPPVAYPEENTLLIKEEPDLDGALLSGPDGDRNVNANLLAEAGTHDFKYGLMPGPSNDFKYGLIPGTSN

SEQ ID NO: 23028 - protein, 70 aa, Synthetic construct
MQPPVAYPEENTLLIKEEPDLDGALLSGPDGDRNVNANLLAEAGTSQDGGGLMPGPSNDFKYGLIPGTSN

SEQ ID NO: 23029 - protein, 70 aa, Synthetic construct
MQPPVAYPEENTLLIKEEPDLDGALLSGPDGDRNVNANLLAEAGTSQDGGDAGTSPSNDFKYGLIPGTSN

SEQ ID NO: 23030 - protein, 70 aa, Synthetic construct
MQPPVAYPEENTLLIKEEPDLDGALLSGPDGDRNVNANLLAEAGTSQDGGDAGTSHDFKYKYGLIPGTSN

SEQ ID NO: 23031 - protein, 70 aa, Synthetic construct
MQPPVAYPEENTLLIKEEPDLDGALLSGPDGDRNVNANLLAEAGTSQDGGDAGTSHDFKYGLMPGPGTSN

SEQ ID NO: 23032 - protein, 70 aa, Synthetic construct
MQPPVAYPEENTLLIKEEPDLDGALLSGPDGDRNVNANLLAEAGTSQDGGDAGTSHDFKYGLMPGPSNDF

SEQ ID NO: 23033 - protein, 70 aa, Synthetic construct
VPFLQGFSYPIPSGSYYAPYGMPYTSMPMMNLGYYGQYPAPLYLSHTLGAASPFMRPTVPPPQFHTNSHV

SEQ ID NO: 23034 - protein, 70 aa, Synthetic construct
PAKTNGFSYPIPSGSYYAPYGMPYTSMPMMNLGYYGQYPAPLYLSHTLGAASPFMRPTVPPPQFHTNSHV

SEQ ID NO: 23035 - protein, 70 aa, Synthetic construct
PAKTNDTMTKIPSGSYYAPYGMPYTSMPMMNLGYYGQYPAPLYLSHTLGAASPFMRPTVPPPQFHTNSHV

SEQ ID NO: 23036 - protein, 70 aa, Synthetic construct
PAKTNDTMTKVPFLQYYAPYGMPYTSMPMMNLGYYGQYPAPLYLSHTLGAASPFMRPTVPPPQFHTNSHV

SEQ ID NO: 23037 - protein, 70 aa, Synthetic construct
PAKTNDTMTKVPFLQGFSYPGMPYTSMPMMNLGYYGQYPAPLYLSHTLGAASPFMRPTVPPPQFHTNSHV

SEQ ID NO: 23038 - protein, 70 aa, Synthetic construct
PAKTNDTMTKVPFLQGFSYPIPSGSYYAPYNLGYYGQYPAPLYLSHTLGAASPFMRPTVPPPQFHTNSHV

SEQ ID NO: 23039 - protein, 70 aa, Synthetic construct
PAKTNDTMTKVPFLQGFSYPIPSGSYYAPYGMPYTGQYPAPLYLSHTLGAASPFMRPTVPPPQFHTNSHV

SEQ ID NO: 23040 - protein, 70 aa, Synthetic construct
PAKTNDTMTKVPFLQGFSYPIPSGSYYAPYGMPYTSMPMMPLYLSHTLGAASPFMRPTVPPPQFHTNSHV

SEQ ID NO: 23041 - protein, 70 aa, Synthetic construct
PAKTNDTMTKVPFLQGFSYPIPSGSYYAPYGMPYTSMPMMNLGYYHTLGAASPFMRPTVPPPQFHTNSHV

SEQ ID NO: 23042 - protein, 70 aa, Synthetic construct
PAKTNDTMTKVPFLQGFSYPIPSGSYYAPYGMPYTSMPMMNLGYYGQYPAASPFMRPTVPPPQFHTNSHV

SEQ ID NO: 23043 - protein, 70 aa, Synthetic construct
PAKTNDTMTKVPFLQGFSYPIPSGSYYAPYGMPYTSMPMMNLGYYGQYPAPLYLSRPTVPPPQFHTNSHV

SEQ ID NO: 23044 - protein, 70 aa, Synthetic construct
PAKTNDTMTKVPFLQGFSYPIPSGSYYAPYGMPYTSMPMMNLGYYGQYPAPLYLSHTLGAPPQFHTNSHV

SEQ ID NO: 23045 - protein, 70 aa, Synthetic construct
PAKTNDTMTKVPFLQGFSYPIPSGSYYAPYGMPYTSMPMMNLGYYGQYPAPLYLSHTLGAASPFMTNSHV

SEQ ID NO: 23046 - protein, 70 aa, Synthetic construct
PAKTNDTMTKVPFLQGFSYPIPSGSYYAPYGMPYTSMPMMNLGYYGQYPAPLYLSHTLGAASPFMRPTVP

SEQ ID NO: 23047 - protein, 70 aa, Synthetic construct
KKKERTEFLQRESERLELMNAELKTQIEELKQERQQLILMLNRHRPTCIVRTDSVKTPESEGNPLLEQLE

SEQ ID NO: 23048 - protein, 70 aa, Synthetic construct
NKVAATEFLQRESERLELMNAELKTQIEELKQERQQLILMLNRHRPTCIVRTDSVKTPESEGNPLLEQLE

SEQ ID NO: 23049 - protein, 70 aa, Synthetic construct
NKVAAARCRNRESERLELMNAELKTQIEELKQERQQLILMLNRHRPTCIVRTDSVKTPESEGNPLLEQLE

SEQ ID NO: 23050 - protein, 70 aa, Synthetic construct
NKVAAARCRNKKKERLELMNAELKTQIEELKQERQQLILMLNRHRPTCIVRTDSVKTPESEGNPLLEQLE

SEQ ID NO: 23051 - protein, 70 aa, Synthetic construct
NKVAAARCRNKKKERTEFLQAELKTQIEELKQERQQLILMLNRHRPTCIVRTDSVKTPESEGNPLLEQLE

SEQ ID NO: 23052 - protein, 70 aa, Synthetic construct
NKVAAARCRNKKKERTEFLQRESERQIEELKQERQQLILMLNRHRPTCIVRTDSVKTPESEGNPLLEQLE

SEQ ID NO: 23053 - protein, 70 aa, Synthetic construct
NKVAAARCRNKKKERTEFLQRESERLELMNKQERQQLILMLNRHRPTCIVRTDSVKTPESEGNPLLEQLE

SEQ ID NO: 23054 - protein, 70 aa, Synthetic construct
NKVAAARCRNKKKERTEFLQRESERLELMNAELKTQLILMLNRHRPTCIVRTDSVKTPESEGNPLLEQLE

SEQ ID NO: 23055 - protein, 70 aa, Synthetic construct
NKVAAARCRNKKKERTEFLQRESERLELMNAELKTQIEELLNRHRPTCIVRTDSVKTPESEGNPLLEQLE

SEQ ID NO: 23056 - protein, 70 aa, Synthetic construct
NKVAAARCRNKKKERTEFLQRESERLELMNAELKTQIEELKQERQQLILMLNRHRPTCIVEGNPLLEQLE

SEQ ID NO: 23057 - protein, 70 aa, Synthetic construct
NKVAAARCRNKKKERTEFLQRESERLELMNAELKTQIEELKQERQQLILMLNRHRPTCIVRTDSVLEQLE

SEQ ID NO: 23058 - protein, 70 aa, Synthetic construct
NKVAAARCRNKKKERTEFLQRESERLELMNAELKTQIEELKQERQQLILMLNRHRPTCIVRTDSVKTPES

SEQ ID NO: 23059 - protein, 70 aa, Synthetic construct
LEQGNLKKALVNVEWNICQDCKTDNKVKDKAEEETEEKPSVWLCLKCGHQGCGRNSQEQHALKHYLTPRS

SEQ ID NO: 23060 - protein, 70 aa, Synthetic construct
EPVCRLKKALVNVEWNICQDCKTDNKVKDKAEEETEEKPSVWLCLKCGHQGCGRNSQEQHALKHYLTPRS

SEQ ID NO: 23061 - protein, 70 aa, Synthetic construct
EPVCRHIRKGVNVEWNICQDCKTDNKVKDKAEEETEEKPSVWLCLKCGHQGCGRNSQEQHALKHYLTPRS

SEQ ID NO: 23062 - protein, 70 aa, Synthetic construct
EPVCRHIRKGLEQGNNICQDCKTDNKVKDKAEEETEEKPSVWLCLKCGHQGCGRNSQEQHALKHYLTPRS

SEQ ID NO: 23063 - protein, 70 aa, Synthetic construct
EPVCRHIRKGLEQGNLKKALCKTDNKVKDKAEEETEEKPSVWLCLKCGHQGCGRNSQEQHALKHYLTPRS

SEQ ID NO: 23064 - protein, 70 aa, Synthetic construct
EPVCRHIRKGLEQGNLKKALVNVEWKVKDKAEEETEEKPSVWLCLKCGHQGCGRNSQEQHALKHYLTPRS

SEQ ID NO: 23065 - protein, 70 aa, Synthetic construct
EPVCRHIRKGLEQGNLKKALVNVEWNICQDAEEETEEKPSVWLCLKCGHQGCGRNSQEQHALKHYLTPRS

SEQ ID NO: 23066 - protein, 70 aa, Synthetic construct
EPVCRHIRKGLEQGNLKKALVNVEWNICQDCKTDNEEKPSVWLCLKCGHQGCGRNSQEQHALKHYLTPRS

SEQ ID NO: 23067 - protein, 70 aa, Synthetic construct
EEESSSSSSDEDEDDRKQIDELLGKVVCVDYISLDKKKALWFPALVVCPDCSDEIAVKKDNILVRSFKDG

SEQ ID NO: 23068 - protein, 70 aa, Synthetic construct
NRGRRSSSSDEDEDDRKQIDELLGKVVCVDYISLDKKKALWFPALVVCPDCSDEIAVKKDNILVRSFKDG

SEQ ID NO: 23069 - protein, 70 aa, Synthetic construct
NRGRRSNHIPEDEDDRKQIDELLGKVVCVDYISLDKKKALWFPALVVCPDCSDEIAVKKDNILVRSFKDG

SEQ ID NO: 23070 - protein, 70 aa, Synthetic construct
NRGRRSNHIPEEESSRKQIDELLGKVVCVDYISLDKKKALWFPALVVCPDCSDEIAVKKDNILVRSFKDG

SEQ ID NO: 23071 - protein, 70 aa, Synthetic construct
NRGRRSNHIPEEESSSSSSDELLGKVVCVDYISLDKKKALWFPALVVCPDCSDEIAVKKDNILVRSFKDG

SEQ ID NO: 23072 - protein, 70 aa, Synthetic construct
NRGRRSNHIPEEESSSSSSDEDEDDVVCVDYISLDKKKALWFPALVVCPDCSDEIAVKKDNILVRSFKDG

SEQ ID NO: 23073 - protein, 70 aa, Synthetic construct
NRGRRSNHIPEEESSSSSSDEDEDDRKQIDYISLDKKKALWFPALVVCPDCSDEIAVKKDNILVRSFKDG

SEQ ID NO: 23074 - protein, 70 aa, Synthetic construct
NRGRRSNHIPEEESSSSSSDEDEDDRKQIDELLGKKKKALWFPALVVCPDCSDEIAVKKDNILVRSFKDG

SEQ ID NO: 23075 - protein, 70 aa, Synthetic construct
NRGRRSNHIPEEESSSSSSDEDEDDRKQIDELLGKVVCVDWFPALVVCPDCSDEIAVKKDNILVRSFKDG

SEQ ID NO: 23076 - protein, 70 aa, Synthetic construct
NRGRRSNHIPEEESSSSSSDEDEDDRKQIDELLGKVVCVDYISLDVVCPDCSDEIAVKKDNILVRSFKDG

SEQ ID NO: 23077 - protein, 70 aa, Synthetic construct
NRGRRSNHIPEEESSSSSSDEDEDDRKQIDELLGKVVCVDYISLDKKKALWFPALVVCPDNILVRSFKDG

SEQ ID NO: 23078 - protein, 70 aa, Synthetic construct
NRGRRSNHIPEEESSSSSSDEDEDDRKQIDELLGKVVCVDYISLDKKKALWFPALVVCPDCSDEISFKDG

SEQ ID NO: 23079 - protein, 70 aa, Synthetic construct
NRGRRSNHIPEEESSSSSSDEDEDDRKQIDELLGKVVCVDYISLDKKKALWFPALVVCPDCSDEIAVKKD

SEQ ID NO: 23080 - protein, 70 aa, Synthetic construct
IPVLNSAAGYYGFEEYCRSANIEFQMALPEKVVNKQCKECENVKEIKVKEENETEIKEIKMEEERNIIPR

SEQ ID NO: 23081 - protein, 70 aa, Synthetic construct
IPVLNSAAGYNVKCAYCRSANIEFQMALPEKVVNKQCKECENVKEIKVKEENETEIKEIKMEEERNIIPR

SEQ ID NO: 23082 - protein, 70 aa, Synthetic construct
IPVLNSAAGYNVKCAYKKYLNIEFQMALPEKVVNKQCKECENVKEIKVKEENETEIKEIKMEEERNIIPR

SEQ ID NO: 23083 - protein, 70 aa, Synthetic construct
IPVLNSAAGYNVKCAYKKYLYGFEEMALPEKVVNKQCKECENVKEIKVKEENETEIKEIKMEEERNIIPR

SEQ ID NO: 23084 - protein, 70 aa, Synthetic construct
IPVLNSAAGYNVKCAYKKYLYGFEEYCRSANIEFQQCKECENVKEIKVKEENETEIKEIKMEEERNIIPR

SEQ ID NO: 23085 - protein, 70 aa, Synthetic construct
IPVLNSAAGYNVKCAYKKYLYGFEEYCRSANIEFQMALPEENVKEIKVKEENETEIKEIKMEEERNIIPR

SEQ ID NO: 23086 - protein, 70 aa, Synthetic construct
IPVLNSAAGYNVKCAYKKYLYGFEEYCRSANIEFQMALPEKVVNKQCKECENETEIKEIKMEEERNIIPR

SEQ ID NO: 23087 - protein, 70 aa, Synthetic construct
IPVLNSAAGYNVKCAYKKYLYGFEEYCRSANIEFQMALPEKVVNKQCKECENVKEIKEIKMEEERNIIPR

SEQ ID NO: 23088 - protein, 70 aa, Synthetic construct
IPVLNSAAGYNVKCAYKKYLYGFEEYCRSANIEFQMALPEKVVNKQCKECENVKEIKVKEMEEERNIIPR

SEQ ID NO: 23089 - protein, 70 aa, Synthetic construct
IKKPEDTTRVDESLNIKVEAEEEKAKSGDETNKEEDEDDEEAEEEEEEEEEEEDEDDDDNNEEEEFECYP

SEQ ID NO: 23090 - protein, 70 aa, Synthetic construct
IKKPEDNENLDESLNIKVEAEEEKAKSGDETNKEEDEDDEEAEEEEEEEEEEEDEDDDDNNEEEEFECYP

SEQ ID NO: 23091 - protein, 70 aa, Synthetic construct
IKKPEDNENLDDKDDDTTRVDESLNIKVEAEEEKADEDDEEAEEEEEEEEEEEDEDDDDNNEEEEFECYP

SEQ ID NO: 23092 - protein, 70 aa, Synthetic construct
IKKPEDNENLDDKDDDTTRVDESLNIKVEAEEEKAKSGDETNKEEEEEEEEEEDEDDDDNNEEEEFECYP

SEQ ID NO: 23093 - protein, 70 aa, Synthetic construct
IKKPEDNENLDDKDDDTTRVDESLNIKVEAEEEKAKSGDETNKEEDEDDEEEEDEDDDDNNEEEEFECYP

SEQ ID NO: 23094 - protein, 70 aa, Synthetic construct
IKKPEDNENLDDKDDDTTRVDESLNIKVEAEEEKAKSGDETNKEEDEDDEEAEEEDDDDNNEEEEFECYP

SEQ ID NO: 23095 - protein, 70 aa, Synthetic construct
IKKPEDNENLDDKDDDTTRVDESLNIKVEAEEEKAKSGDETNKEEDEDDEEAEEEEEEEEEEEDEFECYP

SEQ ID NO: 23096 - protein, 70 aa, Synthetic construct
MSITSDEVNFLVYRYLQESGFSHSAFTFGIESHISQSNINSILQKGLQYVEAEISINKDGTVFDSRPIES

SEQ ID NO: 23097 - protein, 70 aa, Synthetic construct
MSITSDEVNFLVYRYLQESGFSHSAFTFGIESHISQSNINGTLVPGLQYVEAEISINKDGTVFDSRPIES

SEQ ID NO: 23098 - protein, 70 aa, Synthetic construct
MSITSDEVNFLVYRYLQESGFSHSAFTFGIESHISQSNINGTLVPPSALIEAEISINKDGTVFDSRPIES

SEQ ID NO: 23099 - protein, 70 aa, Synthetic construct
MSITSDEVNFLVYRYLQESGFSHSAFTFGIESHISQSNINGTLVPPSALISILQKINKDGTVFDSRPIES

SEQ ID NO: 23100 - protein, 70 aa, Synthetic construct
MSITSDEVNFLVYRYLQESGFSHSAFTFGIESHISQSNINGTLVPPSALISILQKGLQYVTVFDSRPIES

SEQ ID NO: 23101 - protein, 70 aa, Synthetic construct
MSITSDEVNFLVYRYLQESGFSHSAFTFGIESHISQSNINGTLVPPSALISILQKGLQYVEAEISRPIES

SEQ ID NO: 23102 - protein, 70 aa, Synthetic construct
MSITSDEVNFLVYRYLQESGFSHSAFTFGIESHISQSNINGTLVPPSALISILQKGLQYVEAEISINKDG

SEQ ID NO: 23103 - protein, 70 aa, Synthetic construct
EAKVKEEIPDPDVKGSPHLSDSACLGQQREGGGTELVGTMMTSNTPERTSQGGAGVSPLLVKEEPKEDNG

SEQ ID NO: 23104 - protein, 70 aa, Synthetic construct
MRCHQEEIPDPDVKGSPHLSDSACLGQQREGGGTELVGTMMTSNTPERTSQGGAGVSPLLVKEEPKEDNG

SEQ ID NO: 23105 - protein, 70 aa, Synthetic construct
MRCHQHFLRTPDVKGSPHLSDSACLGQQREGGGTELVGTMMTSNTPERTSQGGAGVSPLLVKEEPKEDNG

SEQ ID NO: 23106 - protein, 70 aa, Synthetic construct
MRCHQHFLRTEAKVKSPHLSDSACLGQQREGGGTELVGTMMTSNTPERTSQGGAGVSPLLVKEEPKEDNG

SEQ ID NO: 23107 - protein, 70 aa, Synthetic construct
MRCHQHFLRTEAKVKEEIPDDSACLGQQREGGGTELVGTMMTSNTPERTSQGGAGVSPLLVKEEPKEDNG

SEQ ID NO: 23108 - protein, 70 aa, Synthetic construct
MRCHQHFLRTEAKVKEEIPDPDVKGGQQREGGGTELVGTMMTSNTPERTSQGGAGVSPLLVKEEPKEDNG

SEQ ID NO: 23109 - protein, 70 aa, Synthetic construct
MRCHQHFLRTEAKVKEEIPDPDVKGSPHLSGGGTELVGTMMTSNTPERTSQGGAGVSPLLVKEEPKEDNG

SEQ ID NO: 23110 - protein, 70 aa, Synthetic construct
MRCHQHFLRTEAKVKEEIPDPDVKGSPHLSDSACLLVGTMMTSNTPERTSQGGAGVSPLLVKEEPKEDNG

SEQ ID NO: 23111 - protein, 70 aa, Synthetic construct
MRCHQHFLRTEAKVKEEIPDPDVKGSPHLSDSACLGQQREMTSNTPERTSQGGAGVSPLLVKEEPKEDNG

SEQ ID NO: 23112 - protein, 70 aa, Synthetic construct
MRCHQHFLRTEAKVKEEIPDPDVKGSPHLSDSACLGQQREGGGTEPERTSQGGAGVSPLLVKEEPKEDNG

SEQ ID NO: 23113 - protein, 70 aa, Synthetic construct
MRCHQHFLRTEAKVKEEIPDPDVKGSPHLSDSACLGQQREGGGTELVGTMQGGAGVSPLLVKEEPKEDNG

SEQ ID NO: 23114 - protein, 70 aa, Synthetic construct
MRCHQHFLRTEAKVKEEIPDPDVKGSPHLSDSACLGQQREGGGTELVGTMMTSNTVSPLLVKEEPKEDNG

SEQ ID NO: 23115 - protein, 70 aa, Synthetic construct
MRCHQHFLRTEAKVKEEIPDPDVKGSPHLSDSACLGQQREGGGTELVGTMMTSNTPERTSVKEEPKEDNG

SEQ ID NO: 23116 - protein, 70 aa, Synthetic construct
MRCHQHFLRTEAKVKEEIPDPDVKGSPHLSDSACLGQQREGGGTELVGTMMTSNTPERTSQGGAGKEDNG

SEQ ID NO: 23117 - protein, 70 aa, Synthetic construct
MRCHQHFLRTEAKVKEEIPDPDVKGSPHLSDSACLGQQREGGGTELVGTMMTSNTPERTSQGGAGVSPLL

SEQ ID NO: 23118 - protein, 70 aa, Synthetic construct
ALKPQEGKGSVLRRDVSVKAASELLMKLSAESYKETQMVKIKEEPMEVDIQDSHVSISPSRNVGYSTLIG

SEQ ID NO: 23119 - protein, 70 aa, Synthetic construct
EVSAPEGKGSVLRRDVSVKAASELLMKLSAESYKETQMVKIKEEPMEVDIQDSHVSISPSRNVGYSTLIG

SEQ ID NO: 23120 - protein, 70 aa, Synthetic construct
EVSAPGVSEDVLRRDVSVKAASELLMKLSAESYKETQMVKIKEEPMEVDIQDSHVSISPSRNVGYSTLIG

SEQ ID NO: 23121 - protein, 70 aa, Synthetic construct
EVSAPGVSEDALKPQVSVKAASELLMKLSAESYKETQMVKIKEEPMEVDIQDSHVSISPSRNVGYSTLIG

SEQ ID NO: 23122 - protein, 70 aa, Synthetic construct
EVSAPGVSEDALKPQEGKGSASELLMKLSAESYKETQMVKIKEEPMEVDIQDSHVSISPSRNVGYSTLIG

SEQ ID NO: 23123 - protein, 70 aa, Synthetic construct
EVSAPGVSEDALKPQEGKGSVLRRDMKLSAESYKETQMVKIKEEPMEVDIQDSHVSISPSRNVGYSTLIG

SEQ ID NO: 23124 - protein, 70 aa, Synthetic construct
EVSAPGVSEDALKPQEGKGSVLRRDVSVKAESYKETQMVKIKEEPMEVDIQDSHVSISPSRNVGYSTLIG

SEQ ID NO: 23125 - protein, 70 aa, Synthetic construct
EVSAPGVSEDALKPQEGKGSVLRRDVSVKAASELLTQMVKIKEEPMEVDIQDSHVSISPSRNVGYSTLIG

SEQ ID NO: 23126 - protein, 70 aa, Synthetic construct
EVSAPGVSEDALKPQEGKGSVLRRDVSVKAASELLMKLSAIKEEPMEVDIQDSHVSISPSRNVGYSTLIG

SEQ ID NO: 23127 - protein, 70 aa, Synthetic construct
EVSAPGVSEDALKPQEGKGSVLRRDVSVKAASELLMKLSAESYKETQMVKIKEEPSISPSRNVGYSTLIG

SEQ ID NO: 23128 - protein, 70 aa, Synthetic construct
EVSAPGVSEDALKPQEGKGSVLRRDVSVKAASELLMKLSAESYKETQMVKIKEEPMEVDIRNVGYSTLIG

SEQ ID NO: 23129 - protein, 70 aa, Synthetic construct
EVSAPGVSEDALKPQEGKGSVLRRDVSVKAASELLMKLSAESYKETQMVKIKEEPMEVDIQDSHVSTLIG

SEQ ID NO: 23130 - protein, 70 aa, Synthetic construct
EVSAPGVSEDALKPQEGKGSVLRRDVSVKAASELLMKLSAESYKETQMVKIKEEPMEVDIQDSHVSISPS

SEQ ID NO: 23131 - protein, 70 aa, Synthetic construct
ALAFNGSPLRFDKYRNSDFAHLIPLTMLYPKNHLDLTFHPPRPQTAPPSIPSPKHSFLAYLGLRERAETV

SEQ ID NO: 23132 - protein, 70 aa, Synthetic construct
SSSEPGSPLRFDKYRNSDFAHLIPLTMLYPKNHLDLTFHPPRPQTAPPSIPSPKHSFLAYLGLRERAETV

SEQ ID NO: 23133 - protein, 70 aa, Synthetic construct
SSSEPNLALKFDKYRNSDFAHLIPLTMLYPKNHLDLTFHPPRPQTAPPSIPSPKHSFLAYLGLRERAETV

SEQ ID NO: 23134 - protein, 70 aa, Synthetic construct
SSSEPNLALKALAFNNSDFAHLIPLTMLYPKNHLDLTFHPPRPQTAPPSIPSPKHSFLAYLGLRERAETV

SEQ ID NO: 23135 - protein, 70 aa, Synthetic construct
SSSEPNLALKALAFNGSPLRHLIPLTMLYPKNHLDLTFHPPRPQTAPPSIPSPKHSFLAYLGLRERAETV

SEQ ID NO: 23136 - protein, 70 aa, Synthetic construct
SSSEPNLALKALAFNGSPLRFDKYRNSDFAHLIPLLTFHPPRPQTAPPSIPSPKHSFLAYLGLRERAETV

SEQ ID NO: 23137 - protein, 70 aa, Synthetic construct
SSSEPNLALKALAFNGSPLRFDKYRNSDFAHLIPLTMLYPPRPQTAPPSIPSPKHSFLAYLGLRERAETV

SEQ ID NO: 23138 - protein, 70 aa, Synthetic construct
SSSEPNLALKALAFNGSPLRFDKYRNSDFAHLIPLTMLYPKNHLDAPPSIPSPKHSFLAYLGLRERAETV

SEQ ID NO: 23139 - protein, 70 aa, Synthetic construct
SSSEPNLALKALAFNGSPLRFDKYRNSDFAHLIPLTMLYPKNHLDLTFHPPSPKHSFLAYLGLRERAETV

SEQ ID NO: 23140 - protein, 70 aa, Synthetic construct
EASGTVCLDVLTNIFESFLPQLLAYPNPIDPLNGDAAAMYLHRPEEYKQKIKEYIQKYATEEALKEQEEG

SEQ ID NO: 23141 - protein, 70 aa, Synthetic construct
EASGTVCLDVINQTWTALYDQLLAYPNPIDPLNGDAAAMYLHRPEEYKQKIKEYIQKYATEEALKEQEEG

SEQ ID NO: 23142 - protein, 70 aa, Synthetic construct
EASGTVCLDVINQTWTALYDLTNIFPNPIDPLNGDAAAMYLHRPEEYKQKIKEYIQKYATEEALKEQEEG

SEQ ID NO: 23143 - protein, 70 aa, Synthetic construct
EASGTVCLDVINQTWTALYDLTNIFESFLPPLNGDAAAMYLHRPEEYKQKIKEYIQKYATEEALKEQEEG

SEQ ID NO: 23144 - protein, 70 aa, Synthetic construct
EASGTVCLDVINQTWTALYDLTNIFESFLPQLLAYPNPIDLHRPEEYKQKIKEYIQKYATEEALKEQEEG

SEQ ID NO: 23145 - protein, 70 aa, Synthetic construct
EASGTVCLDVINQTWTALYDLTNIFESFLPQLLAYPNPIDPLNGDEYKQKIKEYIQKYATEEALKEQEEG

SEQ ID NO: 23146 - protein, 70 aa, Synthetic construct
EASGTVCLDVINQTWTALYDLTNIFESFLPQLLAYPNPIDPLNGDAAAMYIKEYIQKYATEEALKEQEEG

SEQ ID NO: 23147 - protein, 70 aa, Synthetic construct
EASGTVCLDVINQTWTALYDLTNIFESFLPQLLAYPNPIDPLNGDAAAMYLHRPEQKYATEEALKEQEEG

SEQ ID NO: 23148 - protein, 70 aa, Synthetic construct
EASGTVCLDVINQTWTALYDLTNIFESFLPQLLAYPNPIDPLNGDAAAMYLHRPEEYKQKEEALKEQEEG

SEQ ID NO: 23149 - protein, 70 aa, Synthetic construct
EASGTVCLDVINQTWTALYDLTNIFESFLPQLLAYPNPIDPLNGDAAAMYLHRPEEYKQKIKEYIEQEEG

SEQ ID NO: 23150 - protein, 70 aa, Synthetic construct
EASGTVCLDVINQTWTALYDLTNIFESFLPQLLAYPNPIDPLNGDAAAMYLHRPEEYKQKIKEYIQKYAT

SEQ ID NO: 23151 - protein, 70 aa, Synthetic construct
NERLNGDETAVEDFCNNFRDFIERENLQPEQIYNADETGLFWKCLPSRISVIKGKCTVPGMCCANATGLH

SEQ ID NO: 23152 - protein, 70 aa, Synthetic construct
VRKPRTIYSSFQLAALQRRFQKTQYLALPERAELAASLGLTQTQVKIWFQNRRSKFKKMWKSGEIPSEQH

SEQ ID NO: 23153 - protein, 70 aa, Synthetic construct
RRGKNKVAAQNCRKRKLETIVQLERELERLTNERERLLRARGEADRTLEVMRQQLTELYRDIFQHLRDES

SEQ ID NO: 23154 - protein, 70 aa, Synthetic construct
SQLALKVAAQNCRKRKLETIVQLERELERLTNERERLLRARGEADRTLEVMRQQLTELYRDIFQHLRDES

SEQ ID NO: 23155 - protein, 70 aa, Synthetic construct
SQLALVRDIRNCRKRKLETIVQLERELERLTNERERLLRARGEADRTLEVMRQQLTELYRDIFQHLRDES

SEQ ID NO: 23156 - protein, 70 aa, Synthetic construct
SQLALVRDIRRRGKNKVAAQNCRKRELERLTNERERLLRARGEADRTLEVMRQQLTELYRDIFQHLRDES

SEQ ID NO: 23157 - protein, 70 aa, Synthetic construct
SQLALVRDIRRRGKNKVAAQNCRKRKLETIVQLERRLLRARGEADRTLEVMRQQLTELYRDIFQHLRDES

SEQ ID NO: 23158 - protein, 70 aa, Synthetic construct
SQLALVRDIRRRGKNKVAAQNCRKRKLETIVQLERELERLRGEADRTLEVMRQQLTELYRDIFQHLRDES

SEQ ID NO: 23159 - protein, 70 aa, Synthetic construct
SQLALVRDIRRRGKNKVAAQNCRKRKLETIVQLERELERLTNERERTLEVMRQQLTELYRDIFQHLRDES

SEQ ID NO: 23160 - protein, 70 aa, Synthetic construct
SQLALVRDIRRRGKNKVAAQNCRKRKLETIVQLERELERLTNERERLLRAMRQQLTELYRDIFQHLRDES

SEQ ID NO: 23161 - protein, 70 aa, Synthetic construct
SGLHEKRKQRRIRTTFTSAQLKELERVFAETHYPDIYTREELALKIDLTEARVQVWFQNRRAKFRKQERA

SEQ ID NO: 23162 - protein, 70 aa, Synthetic construct
AVPYKKRKQRRIRTTFTSAQLKELERVFAETHYPDIYTREELALKIDLTEARVQVWFQNRRAKFRKQERA

SEQ ID NO: 23163 - protein, 70 aa, Synthetic construct
AVPYKFFPEPSGLHEKRKQRRIRTTFTSAQLKELEIYTREELALKIDLTEARVQVWFQNRRAKFRKQERA

SEQ ID NO: 23164 - protein, 70 aa, Synthetic construct
GEEVAWEQAAVAFDAVLRFAERQPCFSAQEVGQLRALRAVFRSQQQVRRRRGALGAVVKVEALQEGPGGC

SEQ ID NO: 23165 - protein, 70 aa, Synthetic construct
DQDGRWEQAAVAFDAVLRFAERQPCFSAQEVGQLRALRAVFRSQQQVRRRRGALGAVVKVEALQEGPGGC

SEQ ID NO: 23166 - protein, 70 aa, Synthetic construct
DQDGRGDPGEGEEVAWEQAAVAFDAVLRFAERQPCFSAQEVGQLRALRAVFRSQQQVRRREALQEGPGGC

SEQ ID NO: 23167 - protein, 70 aa, Synthetic construct
DQDGRGDPGEGEEVAWEQAAVAFDAVLRFAERQPCFSAQEVGQLRALRAVFRSQQQVRRRRGALGGPGGC

SEQ ID NO: 23168 - protein, 70 aa, Synthetic construct
DQDGRGDPGEGEEVAWEQAAVAFDAVLRFAERQPCFSAQEVGQLRALRAVFRSQQQVRRRRGALGAVVKV

SEQ ID NO: 23169 - protein, 70 aa, Synthetic construct
LDYSKFQELVLPHFGKEDAGDVQQFYDLLSGSLEVIRKWAEKIPGFAELSPADQDLLLESAFLELFILRL

SEQ ID NO: 23170 - protein, 70 aa, Synthetic construct
HLDSGFQELVLPHFGKEDAGDVQQFYDLLSGSLEVIRKWAEKIPGFAELSPADQDLLLESAFLELFILRL

SEQ ID NO: 23171 - protein, 70 aa, Synthetic construct
HLDSGPSTAKLPHFGKEDAGDVQQFYDLLSGSLEVIRKWAEKIPGFAELSPADQDLLLESAFLELFILRL

SEQ ID NO: 23172 - protein, 70 aa, Synthetic construct
HLDSGPSTAKLDYSKKEDAGDVQQFYDLLSGSLEVIRKWAEKIPGFAELSPADQDLLLESAFLELFILRL

SEQ ID NO: 23173 - protein, 70 aa, Synthetic construct
HLDSGPSTAKLDYSKFQELVDVQQFYDLLSGSLEVIRKWAEKIPGFAELSPADQDLLLESAFLELFILRL

SEQ ID NO: 23174 - protein, 70 aa, Synthetic construct
HLDSGPSTAKLDYSKFQELVLPHFGKEDAGDVQQFYDLLSGSLEVIRKWAEKIPGFAELSPADQDLLLES

SEQ ID NO: 23175 - protein, 70 aa, Synthetic construct
GQVGGLAPPEPADRPCAGLRCPECSVKFESAEDLESHMQVDHRDLTPETSGPRKGTQTSPVPRKKTYQCI

SEQ ID NO: 23176 - protein, 70 aa, Synthetic construct
CAGCMLAPPEPADRPCAGLRCPECSVKFESAEDLESHMQVDHRDLTPETSGPRKGTQTSPVPRKKTYQCI

SEQ ID NO: 23177 - protein, 70 aa, Synthetic construct
CAGCMARSANPADRPCAGLRCPECSVKFESAEDLESHMQVDHRDLTPETSGPRKGTQTSPVPRKKTYQCI

SEQ ID NO: 23178 - protein, 70 aa, Synthetic construct
CAGCMARSANGQVGGCAGLRCPECSVKFESAEDLESHMQVDHRDLTPETSGPRKGTQTSPVPRKKTYQCI

SEQ ID NO: 23179 - protein, 70 aa, Synthetic construct
CAGCMARSANGQVGGLAPPEPADRPCAGLRCPECSVKFESAEDLETPETSGPRKGTQTSPVPRKKTYQCI

SEQ ID NO: 23180 - protein, 70 aa, Synthetic construct
CAGCMARSANGQVGGLAPPEPADRPCAGLRCPECSVKFESAEDLESHMQVGPRKGTQTSPVPRKKTYQCI

SEQ ID NO: 23181 - protein, 70 aa, Synthetic construct
CAGCMARSANGQVGGLAPPEPADRPCAGLRCPECSVKFESAEDLESHMQVDHRDLTQTSPVPRKKTYQCI

SEQ ID NO: 23182 - protein, 70 aa, Synthetic construct
CAGCMARSANGQVGGLAPPEPADRPCAGLRCPECSVKFESAEDLESHMQVDHRDLTPETSVPRKKTYQCI

SEQ ID NO: 23183 - protein, 70 aa, Synthetic construct
CAGCMARSANGQVGGLAPPEPADRPCAGLRCPECSVKFESAEDLESHMQVDHRDLTPETSGPRKGTYQCI

SEQ ID NO: 23184 - protein, 70 aa, Synthetic construct
CAGCMARSANGQVGGLAPPEPADRPCAGLRCPECSVKFESAEDLESHMQVDHRDLTPETSGPRKGTQTSP

SEQ ID NO: 23185 - protein, 70 aa, Synthetic construct
LSQTHHGQSTDHMAVSRPSVIQHVQSFRSKPSEERKTINDIFKHEKLSRSDPHRCSFSKHHLNPLADSYV

SEQ ID NO: 23186 - protein, 70 aa, Synthetic construct
LIARDHGQSTDHMAVSRPSVIQHVQSFRSKPSEERKTINDIFKHEKLSRSDPHRCSFSKHHLNPLADSYV

SEQ ID NO: 23187 - protein, 70 aa, Synthetic construct
LIARDDLCSSDHMAVSRPSVIQHVQSFRSKPSEERKTINDIFKHEKLSRSDPHRCSFSKHHLNPLADSYV

SEQ ID NO: 23188 - protein, 70 aa, Synthetic construct
LIARDDLCSSLSQTHSRPSVIQHVQSFRSKPSEERKTINDIFKHEKLSRSDPHRCSFSKHHLNPLADSYV

SEQ ID NO: 23189 - protein, 70 aa, Synthetic construct
LIARDDLCSSLSQTHHGQSTDHMAVSRPSVIQHVQKTINDIFKHEKLSRSDPHRCSFSKHHLNPLADSYV

SEQ ID NO: 23190 - protein, 70 aa, Synthetic construct
LIARDDLCSSLSQTHHGQSTDHMAVSRPSVIQHVQSFRSKIFKHEKLSRSDPHRCSFSKHHLNPLADSYV

SEQ ID NO: 23191 - protein, 70 aa, Synthetic construct
LIARDDLCSSLSQTHHGQSTDHMAVSRPSVIQHVQSFRSKPSEERKLSRSDPHRCSFSKHHLNPLADSYV

SEQ ID NO: 23192 - protein, 70 aa, Synthetic construct
LIARDDLCSSLSQTHHGQSTDHMAVSRPSVIQHVQSFRSKPSEERKTINDDPHRCSFSKHHLNPLADSYV

SEQ ID NO: 23193 - protein, 70 aa, Synthetic construct
LIARDDLCSSLSQTHHGQSTDHMAVSRPSVIQHVQSFRSKPSEERKTINDIFKHESFSKHHLNPLADSYV

SEQ ID NO: 23194 - protein, 70 aa, Synthetic construct
LIARDDLCSSLSQTHHGQSTDHMAVSRPSVIQHVQSFRSKPSEERKTINDIFKHEKLSRSHLNPLADSYV

SEQ ID NO: 23195 - protein, 70 aa, Synthetic construct
LIARDDLCSSLSQTHHGQSTDHMAVSRPSVIQHVQSFRSKPSEERKTINDIFKHEKLSRSDPHRCADSYV

SEQ ID NO: 23196 - protein, 70 aa, Synthetic construct
LIARDDLCSSLSQTHHGQSTDHMAVSRPSVIQHVQSFRSKPSEERKTINDIFKHEKLSRSDPHRCSFSKH

SEQ ID NO: 23197 - protein, 70 aa, Synthetic construct
EAAKVFGGFQVVPAPDGQFAFLIPNGAFAHSGPVIPVYTSNSGTSVGPNAVSPSSGPSLTADSMWRPWRN

SEQ ID NO: 23198 - protein, 70 aa, Synthetic construct
APCKLFGGFQVVPAPDGQFAFLIPNGAFAHSGPVIPVYTSNSGTSVGPNAVSPSSGPSLTADSMWRPWRN

SEQ ID NO: 23199 - protein, 70 aa, Synthetic construct
APCKLGSQAGVVPAPDGQFAFLIPNGAFAHSGPVIPVYTSNSGTSVGPNAVSPSSGPSLTADSMWRPWRN

SEQ ID NO: 23200 - protein, 70 aa, Synthetic construct
APCKLGSQAGEAAKVDGQFAFLIPNGAFAHSGPVIPVYTSNSGTSVGPNAVSPSSGPSLTADSMWRPWRN

SEQ ID NO: 23201 - protein, 70 aa, Synthetic construct
APCKLGSQAGEAAKVFGGFQFLIPNGAFAHSGPVIPVYTSNSGTSVGPNAVSPSSGPSLTADSMWRPWRN

SEQ ID NO: 23202 - protein, 70 aa, Synthetic construct
APCKLGSQAGEAAKVFGGFQVVPAPGAFAHSGPVIPVYTSNSGTSVGPNAVSPSSGPSLTADSMWRPWRN

SEQ ID NO: 23203 - protein, 70 aa, Synthetic construct
APCKLGSQAGEAAKVFGGFQVVPAPDGQFASGPVIPVYTSNSGTSVGPNAVSPSSGPSLTADSMWRPWRN

SEQ ID NO: 23204 - protein, 70 aa, Synthetic construct
APCKLGSQAGEAAKVFGGFQVVPAPDGQFAFLIPNPVYTSNSGTSVGPNAVSPSSGPSLTADSMWRPWRN

SEQ ID NO: 23205 - protein, 70 aa, Synthetic construct
APCKLGSQAGEAAKVFGGFQVVPAPDGQFAFLIPNGAFAHNSGTSVGPNAVSPSSGPSLTADSMWRPWRN

SEQ ID NO: 23206 - protein, 70 aa, Synthetic construct
APCKLGSQAGEAAKVFGGFQVVPAPDGQFAFLIPNGAFAHSGPVIVGPNAVSPSSGPSLTADSMWRPWRN

SEQ ID NO: 23207 - protein, 70 aa, Synthetic construct
APCKLGSQAGEAAKVFGGFQVVPAPDGQFAFLIPNGAFAHSGPVIPVYTSVSPSSGPSLTADSMWRPWRN

SEQ ID NO: 23208 - protein, 70 aa, Synthetic construct
APCKLGSQAGEAAKVFGGFQVVPAPDGQFAFLIPNGAFAHSGPVIPVYTSNSGTSGPSLTADSMWRPWRN

SEQ ID NO: 23209 - protein, 70 aa, Synthetic construct
APCKLGSQAGEAAKVFGGFQVVPAPDGQFAFLIPNGAFAHSGPVIPVYTSNSGTSVGPNAADSMWRPWRN

SEQ ID NO: 23210 - protein, 70 aa, Synthetic construct
ERRRLKKVNQAFETLKRCTTTNPNQRLPKVEILRNAIRYIESLQELLREQVENYYSLPGQSCSEPTSPTS

SEQ ID NO: 23211 - protein, 70 aa, Synthetic construct
MDRRKKKVNQAFETLKRCTTTNPNQRLPKVEILRNAIRYIESLQELLREQVENYYSLPGQSCSEPTSPTS

SEQ ID NO: 23212 - protein, 70 aa, Synthetic construct
MDRRKAATMRAFETLKRCTTTNPNQRLPKVEILRNAIRYIESLQELLREQVENYYSLPGQSCSEPTSPTS

SEQ ID NO: 23213 - protein, 70 aa, Synthetic construct
MDRRKAATMRERRRLKRCTTTNPNQRLPKVEILRNAIRYIESLQELLREQVENYYSLPGQSCSEPTSPTS

SEQ ID NO: 23214 - protein, 70 aa, Synthetic construct
MDRRKAATMRERRRLKKVNQTNPNQRLPKVEILRNAIRYIESLQELLREQVENYYSLPGQSCSEPTSPTS

SEQ ID NO: 23215 - protein, 70 aa, Synthetic construct
MDRRKAATMRERRRLKKVNQAFETLRLPKVEILRNAIRYIESLQELLREQVENYYSLPGQSCSEPTSPTS

SEQ ID NO: 23216 - protein, 70 aa, Synthetic construct
MDRRKAATMRERRRLKKVNQAFETLKRCTTEILRNAIRYIESLQELLREQVENYYSLPGQSCSEPTSPTS

SEQ ID NO: 23217 - protein, 70 aa, Synthetic construct
MDRRKAATMRERRRLKKVNQAFETLKRCTTTNPNQRLPKVEILRNAIRYIESLQELLREQSCSEPTSPTS

SEQ ID NO: 23218 - protein, 70 aa, Synthetic construct
MDRRKAATMRERRRLKKVNQAFETLKRCTTTNPNQRLPKVEILRNAIRYIESLQELLREQVENYYTSPTS

SEQ ID NO: 23219 - protein, 70 aa, Synthetic construct
MDRRKAATMRERRRLKKVNQAFETLKRCTTTNPNQRLPKVEILRNAIRYIESLQELLREQVENYYSLPGQ

SEQ ID NO: 23220 - protein, 70 aa, Synthetic construct
DALDNLRKVVPCYSKTQKLSKIETLRLAKNYIWALSEILRIGKRPDLLTFVQNLCKGLSQPTTNLVAGCL

SEQ ID NO: 23221 - protein, 70 aa, Synthetic construct
RERNRMHGLNDALDNLRKVVPCYSKTQKLSKIETLRLAKNYIWALSEILRIGKRPDLLTFVQNLCKGLSQ

SEQ ID NO: 23222 - protein, 70 aa, Synthetic construct
NGIFSLKQEETLDYGKNYNYGMHYCAVPPRGPLGQGAMFRLPTDSHFPYDLHLRSQSLTMQDELNAVFHN

SEQ ID NO: 23223 - protein, 70 aa, Synthetic construct
GPLSPLKQEETLDYGKNYNYGMHYCAVPPRGPLGQGAMFRLPTDSHFPYDLHLRSQSLTMQDELNAVFHN

SEQ ID NO: 23224 - protein, 70 aa, Synthetic construct
GPLSPPPINYTLDYGKNYNYGMHYCAVPPRGPLGQGAMFRLPTDSHFPYDLHLRSQSLTMQDELNAVFHN

SEQ ID NO: 23225 - protein, 70 aa, Synthetic construct
GPLSPPPINYNGIFSKNYNYGMHYCAVPPRGPLGQGAMFRLPTDSHFPYDLHLRSQSLTMQDELNAVFHN

SEQ ID NO: 23226 - protein, 70 aa, Synthetic construct
GPLSPPPINYNGIFSLKQEEGMHYCAVPPRGPLGQGAMFRLPTDSHFPYDLHLRSQSLTMQDELNAVFHN

SEQ ID NO: 23227 - protein, 70 aa, Synthetic construct
GPLSPPPINYNGIFSLKQEETLDYGAVPPRGPLGQGAMFRLPTDSHFPYDLHLRSQSLTMQDELNAVFHN

SEQ ID NO: 23228 - protein, 70 aa, Synthetic construct
GPLSPPPINYNGIFSLKQEETLDYGKNYNYGPLGQGAMFRLPTDSHFPYDLHLRSQSLTMQDELNAVFHN

SEQ ID NO: 23229 - protein, 70 aa, Synthetic construct
GPLSPPPINYNGIFSLKQEETLDYGKNYNYGMHYCGAMFRLPTDSHFPYDLHLRSQSLTMQDELNAVFHN

SEQ ID NO: 23230 - protein, 70 aa, Synthetic construct
GPLSPPPINYNGIFSLKQEETLDYGKNYNYGMHYCAVPPRLPTDSHFPYDLHLRSQSLTMQDELNAVFHN

SEQ ID NO: 23231 - protein, 70 aa, Synthetic construct
GPLSPPPINYNGIFSLKQEETLDYGKNYNYGMHYCAVPPRGPLGQHFPYDLHLRSQSLTMQDELNAVFHN

SEQ ID NO: 23232 - protein, 70 aa, Synthetic construct
GPLSPPPINYNGIFSLKQEETLDYGKNYNYGMHYCAVPPRGPLGQGAMFRLHLRSQSLTMQDELNAVFHN

SEQ ID NO: 23233 - protein, 70 aa, Synthetic construct
GPLSPPPINYNGIFSLKQEETLDYGKNYNYGMHYCAVPPRGPLGQGAMFRLPTDSQSLTMQDELNAVFHN

SEQ ID NO: 23234 - protein, 70 aa, Synthetic construct
GPLSPPPINYNGIFSLKQEETLDYGKNYNYGMHYCAVPPRGPLGQGAMFRLPTDSHFPYDQDELNAVFHN

SEQ ID NO: 23235 - protein, 70 aa, Synthetic construct
GPLSPPPINYNGIFSLKQEETLDYGKNYNYGMHYCAVPPRGPLGQGAMFRLPTDSHFPYDLHLRSAVFHN

SEQ ID NO: 23236 - protein, 70 aa, Synthetic construct
GPLSPPPINYNGIFSLKQEETLDYGKNYNYGMHYCAVPPRGPLGQGAMFRLPTDSHFPYDLHLRSQSLTM

SEQ ID NO: 23237 - protein, 70 aa, Synthetic construct
RKQRRNRTTFNSSQLQALERVFERTHYPDAFVREDLARRVNLTEARVQVWFQNRRAKFRRNERAMLANKN

SEQ ID NO: 23238 - protein, 70 aa, Synthetic construct
DQLNSEEKKKRKQRRNRTTFNSSQLQALERVFERTLARRVNLTEARVQVWFQNRRAKFRRNERAMLANKN

SEQ ID NO: 23239 - protein, 70 aa, Synthetic construct
DQLNSEEKKKRKQRRNRTTFNSSQLQALERVFERTHYPDAFVREDRVQVWFQNRRAKFRRNERAMLANKN

SEQ ID NO: 23240 - protein, 70 aa, Synthetic construct
DQLNSEEKKKRKQRRNRTTFNSSQLQALERVFERTHYPDAFVREDLARRVNLTEARVQVWFQNRRAKFRR

SEQ ID NO: 23241 - protein, 70 aa, Synthetic construct
RPKPRSRRKPRVLFSQAQVFELERRFKQQRYLSAPEREHLASSLKLTSTQVKIWFQNRRYKCKRQRQDKS

SEQ ID NO: 23242 - protein, 70 aa, Synthetic construct
GDCKASRRKPRVLFSQAQVFELERRFKQQRYLSAPEREHLASSLKLTSTQVKIWFQNRRYKCKRQRQDKS

SEQ ID NO: 23243 - protein, 70 aa, Synthetic construct
GDCKAAEESERPKPRSRRKPRVLFSFKQQRYLSAPEREHLASSLKLTSTQVKIWFQNRRYKCKRQRQDKS

SEQ ID NO: 23244 - protein, 70 aa, Synthetic construct
GDCKAAEESERPKPRSRRKPRVLFSQAQVFYLSAPEREHLASSLKLTSTQVKIWFQNRRYKCKRQRQDKS

SEQ ID NO: 23245 - protein, 70 aa, Synthetic construct
PAAPSSAPPPSNSSSSSAPRRPSSLQSLFGLPEAAGARDSRDNPLRKKKAANLNSIIHRLEKAASREEPI

SEQ ID NO: 23246 - protein, 70 aa, Synthetic construct
TSAAASAPPPSNSSSSSAPRRPSSLQSLFGLPEAAGARDSRDNPLRKKKAANLNSIIHRLEKAASREEPI

SEQ ID NO: 23247 - protein, 70 aa, Synthetic construct
TSAAAAPGEGSNSSSSSAPRRPSSLQSLFGLPEAAGARDSRDNPLRKKKAANLNSIIHRLEKAASREEPI

SEQ ID NO: 23248 - protein, 70 aa, Synthetic construct
TSAAAAPGEGPAAPSSAPPPRPSSLQSLFGLPEAAGARDSRDNPLRKKKAANLNSIIHRLEKAASREEPI

SEQ ID NO: 23249 - protein, 70 aa, Synthetic construct
TSAAAAPGEGPAAPSSAPPPSNSSSQSLFGLPEAAGARDSRDNPLRKKKAANLNSIIHRLEKAASREEPI

SEQ ID NO: 23250 - protein, 70 aa, Synthetic construct
TSAAAAPGEGPAAPSSAPPPSNSSSSSAPRLPEAAGARDSRDNPLRKKKAANLNSIIHRLEKAASREEPI

SEQ ID NO: 23251 - protein, 70 aa, Synthetic construct
EEKRRRRRATAKYRSAHATRERIRVEAFNLAFAELRKLLPTLPPDKKLSKIEILRLAICYISYLNHVLDV

SEQ ID NO: 23252 - protein, 70 aa, Synthetic construct
LYPHPRRRATAKYRSAHATRERIRVEAFNLAFAELRKLLPTLPPDKKLSKIEILRLAICYISYLNHVLDV

SEQ ID NO: 23253 - protein, 70 aa, Synthetic construct
LYPHPQQLSRAKYRSAHATRERIRVEAFNLAFAELRKLLPTLPPDKKLSKIEILRLAICYISYLNHVLDV

SEQ ID NO: 23254 - protein, 70 aa, Synthetic construct
LYPHPQQLSREEKRRAHATRERIRVEAFNLAFAELRKLLPTLPPDKKLSKIEILRLAICYISYLNHVLDV

SEQ ID NO: 23255 - protein, 70 aa, Synthetic construct
LYPHPQQLSREEKRRRRRATERIRVEAFNLAFAELRKLLPTLPPDKKLSKIEILRLAICYISYLNHVLDV

SEQ ID NO: 23256 - protein, 70 aa, Synthetic construct
LYPHPQQLSREEKRRRRRATAKYRSEAFNLAFAELRKLLPTLPPDKKLSKIEILRLAICYISYLNHVLDV

SEQ ID NO: 23257 - protein, 70 aa, Synthetic construct
LYPHPQQLSREEKRRRRRATAKYRSAHATRAFAELRKLLPTLPPDKKLSKIEILRLAICYISYLNHVLDV

SEQ ID NO: 23258 - protein, 70 aa, Synthetic construct
EAPALFRPCTPAVWAPAPAAGGPRSPPPLLLLPESLPGSSASVPPPQPASSRCAESPGLGLRVWRPWGSP

SEQ ID NO: 23259 - protein, 70 aa, Synthetic construct
STMDSFRPCTPAVWAPAPAAGGPRSPPPLLLLPESLPGSSASVPPPQPASSRCAESPGLGLRVWRPWGSP

SEQ ID NO: 23260 - protein, 70 aa, Synthetic construct
STMDSAGLGQPAVWAPAPAAGGPRSPPPLLLLPESLPGSSASVPPPQPASSRCAESPGLGLRVWRPWGSP

SEQ ID NO: 23261 - protein, 70 aa, Synthetic construct
STMDSAGLGQEAPALPAPAAGGPRSPPPLLLLPESLPGSSASVPPPQPASSRCAESPGLGLRVWRPWGSP

SEQ ID NO: 23262 - protein, 70 aa, Synthetic construct
STMDSAGLGQEAPALFRPCTGGPRSPPPLLLLPESLPGSSASVPPPQPASSRCAESPGLGLRVWRPWGSP

SEQ ID NO: 23263 - protein, 70 aa, Synthetic construct
STMDSAGLGQEAPALFRPCTPAVWAPPPLLLLPESLPGSSASVPPPQPASSRCAESPGLGLRVWRPWGSP

SEQ ID NO: 23264 - protein, 70 aa, Synthetic construct
STMDSAGLGQEAPALFRPCTPAVWAPAPAALLPESLPGSSASVPPPQPASSRCAESPGLGLRVWRPWGSP

SEQ ID NO: 23265 - protein, 70 aa, Synthetic construct
STMDSAGLGQEAPALFRPCTPAVWAPAPAAGGPRSLPGSSASVPPPQPASSRCAESPGLGLRVWRPWGSP

SEQ ID NO: 23266 - protein, 70 aa, Synthetic construct
STMDSAGLGQEAPALFRPCTPAVWAPAPAAGGPRSPPPLLASVPPPQPASSRCAESPGLGLRVWRPWGSP

SEQ ID NO: 23267 - protein, 70 aa, Synthetic construct
STMDSAGLGQEAPALFRPCTPAVWAPAPAAGGPRSPPPLLLLPESPQPASSRCAESPGLGLRVWRPWGSP

SEQ ID NO: 23268 - protein, 70 aa, Synthetic construct
STMDSAGLGQEAPALFRPCTPAVWAPAPAAGGPRSPPPLLLLPESLPGSSSRCAESPGLGLRVWRPWGSP

SEQ ID NO: 23269 - protein, 70 aa, Synthetic construct
STMDSAGLGQEAPALFRPCTPAVWAPAPAAGGPRSPPPLLLLPESLPGSSASVPPSPGLGLRVWRPWGSP

SEQ ID NO: 23270 - protein, 70 aa, Synthetic construct
STMDSAGLGQEAPALFRPCTPAVWAPAPAAGGPRSPPPLLLLPESLPGSSASVPPPQPASLRVWRPWGSP

SEQ ID NO: 23271 - protein, 70 aa, Synthetic construct
QQLRQAANVRERRRMQSINDAFEGLRSHIPTLPYEKRLSKVDTLRLAIGYINFLSELVQADLPLRGGGAG

SEQ ID NO: 23272 - protein, 70 aa, Synthetic construct
RRRVRAANVRERRRMQSINDAFEGLRSHIPTLPYEKRLSKVDTLRLAIGYINFLSELVQADLPLRGGGAG

SEQ ID NO: 23273 - protein, 70 aa, Synthetic construct
RRRVRSEAELERRRMQSINDAFEGLRSHIPTLPYEKRLSKVDTLRLAIGYINFLSELVQADLPLRGGGAG

SEQ ID NO: 23274 - protein, 70 aa, Synthetic construct
RRRVRSEAELQQLRQQSINDAFEGLRSHIPTLPYEKRLSKVDTLRLAIGYINFLSELVQADLPLRGGGAG

SEQ ID NO: 23275 - protein, 70 aa, Synthetic construct
RRRVRSEAELQQLRQAANVRERRRMQSINDAFEGLRSHIPTLPYEKRLSKVDTLRLAIGYINFLSGGGAG

SEQ ID NO: 23276 - protein, 70 aa, Synthetic construct
RRRVRSEAELQQLRQAANVRERRRMQSINDAFEGLRSHIPTLPYEKRLSKVDTLRLAIGYINFLSELVQA

SEQ ID NO: 23277 - protein, 70 aa, Synthetic construct
AQCLVSISNRAAVPEHGVAPDAERLRLPEREVTKEHGDPGDTWKDYCTLVTIAKSLLDLNKYRPIQTPSV

SEQ ID NO: 23278 - protein, 70 aa, Synthetic construct
SAAAYSISNRAAVPEHGVAPDAERLRLPEREVTKEHGDPGDTWKDYCTLVTIAKSLLDLNKYRPIQTPSV

SEQ ID NO: 23279 - protein, 70 aa, Synthetic construct
SAAAYMDFVAAAVPEHGVAPDAERLRLPEREVTKEHGDPGDTWKDYCTLVTIAKSLLDLNKYRPIQTPSV

SEQ ID NO: 23280 - protein, 70 aa, Synthetic construct
SAAAYMDFVAAQCLVHGVAPDAERLRLPEREVTKEHGDPGDTWKDYCTLVTIAKSLLDLNKYRPIQTPSV

SEQ ID NO: 23281 - protein, 70 aa, Synthetic construct
SAAAYMDFVAAQCLVSISNRDAERLRLPEREVTKEHGDPGDTWKDYCTLVTIAKSLLDLNKYRPIQTPSV

SEQ ID NO: 23282 - protein, 70 aa, Synthetic construct
SAAAYMDFVAAQCLVSISNRAAVPERLPEREVTKEHGDPGDTWKDYCTLVTIAKSLLDLNKYRPIQTPSV

SEQ ID NO: 23283 - protein, 70 aa, Synthetic construct
SAAAYMDFVAAQCLVSISNRAAVPEHGVAPEVTKEHGDPGDTWKDYCTLVTIAKSLLDLNKYRPIQTPSV

SEQ ID NO: 23284 - protein, 70 aa, Synthetic construct
SAAAYMDFVAAQCLVSISNRAAVPEHGVAPDAERLHGDPGDTWKDYCTLVTIAKSLLDLNKYRPIQTPSV

SEQ ID NO: 23285 - protein, 70 aa, Synthetic construct
SAAAYMDFVAAQCLVSISNRAAVPEHGVAPDAERLRLPERDTWKDYCTLVTIAKSLLDLNKYRPIQTPSV

SEQ ID NO: 23286 - protein, 70 aa, Synthetic construct
SAAAYMDFVAAQCLVSISNRAAVPEHGVAPDAERLRLPEREVTKEYCTLVTIAKSLLDLNKYRPIQTPSV

SEQ ID NO: 23287 - protein, 70 aa, Synthetic construct
SAAAYMDFVAAQCLVSISNRAAVPEHGVAPDAERLRLPEREVTKEHGDPGDTWKDYCTLVTIAKSLLDLN

SEQ ID NO: 23288 - protein, 70 aa, Synthetic construct
YRLCNECLAEFGIDSLPIDLEAEQHLMSPSDGDKDSRWHLSEDENRSYVEIVEDGSADLVIQQVDDSEEE

SEQ ID NO: 23289 - protein, 70 aa, Synthetic construct
GQVVQEGTRRFGIDSLPIDLEAEQHLMSPSDGDKDSRWHLSEDENRSYVEIVEDGSADLVIQQVDDSEEE

SEQ ID NO: 23290 - protein, 70 aa, Synthetic construct
GQVVQEGTRRYRLCNECLAEFGIDSLMSPSDGDKDSRWHLSEDENRSYVEIVEDGSADLVIQQVDDSEEE

SEQ ID NO: 23291 - protein, 70 aa, Synthetic construct
GQVVQEGTRRYRLCNECLAEFGIDSLPIDLDGDKDSRWHLSEDENRSYVEIVEDGSADLVIQQVDDSEEE

SEQ ID NO: 23292 - protein, 70 aa, Synthetic construct
GQVVQEGTRRYRLCNECLAEFGIDSLPIDLEAEQHSRWHLSEDENRSYVEIVEDGSADLVIQQVDDSEEE

SEQ ID NO: 23293 - protein, 70 aa, Synthetic construct
GQVVQEGTRRYRLCNECLAEFGIDSLPIDLEAEQHLMSPSSEDENRSYVEIVEDGSADLVIQQVDDSEEE

SEQ ID NO: 23294 - protein, 70 aa, Synthetic construct
GQVVQEGTRRYRLCNECLAEFGIDSLPIDLEAEQHLMSPSDGDKDRSYVEIVEDGSADLVIQQVDDSEEE

SEQ ID NO: 23295 - protein, 70 aa, Synthetic construct
GQVVQEGTRRYRLCNECLAEFGIDSLPIDLEAEQHLMSPSDGDKDSRWHLIVEDGSADLVIQQVDDSEEE

SEQ ID NO: 23296 - protein, 70 aa, Synthetic construct
GQVVQEGTRRYRLCNECLAEFGIDSLPIDLEAEQHLMSPSDGDKDSRWHLSEDENSADLVIQQVDDSEEE

SEQ ID NO: 23297 - protein, 70 aa, Synthetic construct
GQVVQEGTRRYRLCNECLAEFGIDSLPIDLEAEQHLMSPSDGDKDSRWHLSEDENRSYVEIQQVDDSEEE

SEQ ID NO: 23298 - protein, 70 aa, Synthetic construct
GQVVQEGTRRYRLCNECLAEFGIDSLPIDLEAEQHLMSPSDGDKDSRWHLSEDENRSYVEIVEDGDSEEE

SEQ ID NO: 23299 - protein, 70 aa, Synthetic construct
GQVVQEGTRRYRLCNECLAEFGIDSLPIDLEAEQHLMSPSDGDKDSRWHLSEDENRSYVEIVEDGSADLV

SEQ ID NO: 23300 - protein, 70 aa, Synthetic construct
TSSAKLEAINELIRFDHIYTKPLVLEIPSETESQANVVVKIEEAPLSPSENDHPEFIVSVKEEPVEDDLV

SEQ ID NO: 23301 - protein, 70 aa, Synthetic construct
LPASLSLSVGELIRFDHIYTKPLVLEIPSETESQANVVVKIEEAPLSPSENDHPEFIVSVKEEPVEDDLV

SEQ ID NO: 23302 - protein, 70 aa, Synthetic construct
LPASLSLSVGTSSAKDHIYTKPLVLEIPSETESQANVVVKIEEAPLSPSENDHPEFIVSVKEEPVEDDLV

SEQ ID NO: 23303 - protein, 70 aa, Synthetic construct
LPASLSLSVGTSSAKLEAINKPLVLEIPSETESQANVVVKIEEAPLSPSENDHPEFIVSVKEEPVEDDLV

SEQ ID NO: 23304 - protein, 70 aa, Synthetic construct
LPASLSLSVGTSSAKLEAINELIRFEIPSETESQANVVVKIEEAPLSPSENDHPEFIVSVKEEPVEDDLV

SEQ ID NO: 23305 - protein, 70 aa, Synthetic construct
LPASLSLSVGTSSAKLEAINELIRFDHIYTTESQANVVVKIEEAPLSPSENDHPEFIVSVKEEPVEDDLV

SEQ ID NO: 23306 - protein, 70 aa, Synthetic construct
LPASLSLSVGTSSAKLEAINELIRFDHIYTKPLVLNVVVKIEEAPLSPSENDHPEFIVSVKEEPVEDDLV

SEQ ID NO: 23307 - protein, 70 aa, Synthetic construct
LPASLSLSVGTSSAKLEAINELIRFDHIYTKPLVLEIPSEIEEAPLSPSENDHPEFIVSVKEEPVEDDLV

SEQ ID NO: 23308 - protein, 70 aa, Synthetic construct
LPASLSLSVGTSSAKLEAINELIRFDHIYTKPLVLEIPSETESQALSPSENDHPEFIVSVKEEPVEDDLV

SEQ ID NO: 23309 - protein, 70 aa, Synthetic construct
LPASLSLSVGTSSAKLEAINELIRFDHIYTKPLVLEIPSETESQANVVVKNDHPEFIVSVKEEPVEDDLV

SEQ ID NO: 23310 - protein, 70 aa, Synthetic construct
LPASLSLSVGTSSAKLEAINELIRFDHIYTKPLVLEIPSETESQANVVVKIEEAPFIVSVKEEPVEDDLV

SEQ ID NO: 23311 - protein, 70 aa, Synthetic construct
LPASLSLSVGTSSAKLEAINELIRFDHIYTKPLVLEIPSETESQANVVVKIEEAPLSPSEKEEPVEDDLV

SEQ ID NO: 23312 - protein, 70 aa, Synthetic construct
LPASLSLSVGTSSAKLEAINELIRFDHIYTKPLVLEIPSETESQANVVVKIEEAPLSPSENDHPEEDDLV

SEQ ID NO: 23313 - protein, 70 aa, Synthetic construct
LPASLSLSVGTSSAKLEAINELIRFDHIYTKPLVLEIPSETESQANVVVKIEEAPLSPSENDHPEFIVSV

SEQ ID NO: 23314 - protein, 70 aa, Synthetic construct
IEEAPLSPSENDHPEFIVSVKEEPVEDDLVPELGISNLLSSSHCPKPSSCLLDAYSDCGYGGSLSPFSDM

SEQ ID NO: 23315 - protein, 70 aa, Synthetic construct
TESQALSPSENDHPEFIVSVKEEPVEDDLVPELGISNLLSSSHCPKPSSCLLDAYSDCGYGGSLSPFSDM

SEQ ID NO: 23316 - protein, 70 aa, Synthetic construct
TESQANVVVKNDHPEFIVSVKEEPVEDDLVPELGISNLLSSSHCPKPSSCLLDAYSDCGYGGSLSPFSDM

SEQ ID NO: 23317 - protein, 70 aa, Synthetic construct
TESQANVVVKIEEAPFIVSVKEEPVEDDLVPELGISNLLSSSHCPKPSSCLLDAYSDCGYGGSLSPFSDM

SEQ ID NO: 23318 - protein, 70 aa, Synthetic construct
TESQANVVVKIEEAPLSPSEKEEPVEDDLVPELGISNLLSSSHCPKPSSCLLDAYSDCGYGGSLSPFSDM

SEQ ID NO: 23319 - protein, 70 aa, Synthetic construct
TESQANVVVKIEEAPLSPSENDHPEEDDLVPELGISNLLSSSHCPKPSSCLLDAYSDCGYGGSLSPFSDM

SEQ ID NO: 23320 - protein, 70 aa, Synthetic construct
TESQANVVVKIEEAPLSPSENDHPEFIVSVPELGISNLLSSSHCPKPSSCLLDAYSDCGYGGSLSPFSDM

SEQ ID NO: 23321 - protein, 70 aa, Synthetic construct
TESQANVVVKIEEAPLSPSENDHPEFIVSVKEEPVSNLLSSSHCPKPSSCLLDAYSDCGYGGSLSPFSDM

SEQ ID NO: 23322 - protein, 70 aa, Synthetic construct
TESQANVVVKIEEAPLSPSENDHPEFIVSVKEEPVEDDLVSSHCPKPSSCLLDAYSDCGYGGSLSPFSDM

SEQ ID NO: 23323 - protein, 70 aa, Synthetic construct
TESQANVVVKIEEAPLSPSENDHPEFIVSVKEEPVEDDLVPELGIKPSSCLLDAYSDCGYGGSLSPFSDM

SEQ ID NO: 23324 - protein, 70 aa, Synthetic construct
TESQANVVVKIEEAPLSPSENDHPEFIVSVKEEPVEDDLVPELGISNLLSLLDAYSDCGYGGSLSPFSDM

SEQ ID NO: 23325 - protein, 70 aa, Synthetic construct
TESQANVVVKIEEAPLSPSENDHPEFIVSVKEEPVEDDLVPELGISNLLSSSHCPSDCGYGGSLSPFSDM

SEQ ID NO: 23326 - protein, 70 aa, Synthetic construct
TESQANVVVKIEEAPLSPSENDHPEFIVSVKEEPVEDDLVPELGISNLLSSSHCPKPSSCGGSLSPFSDM

SEQ ID NO: 23327 - protein, 70 aa, Synthetic construct
TESQANVVVKIEEAPLSPSENDHPEFIVSVKEEPVEDDLVPELGISNLLSSSHCPKPSSCLLDAYPFSDM

SEQ ID NO: 23328 - protein, 70 aa, Synthetic construct
TESQANVVVKIEEAPLSPSENDHPEFIVSVKEEPVEDDLVPELGISNLLSSSHCPKPSSCLLDAYSDCGY

SEQ ID NO: 23329 - protein, 70 aa, Synthetic construct
TQIQECFLSPFRKPLSQLTNQPPCLDSSQHEAFIRSILSKPFKVPIPNYQGPLGSRALGLKRAGVRRALH

SEQ ID NO: 23330 - protein, 70 aa, Synthetic construct
TPRKRKSSSEFRKPLSQLTNQPPCLDSSQHEAFIRSILSKPFKVPIPNYQGPLGSRALGLKRAGVRRALH

SEQ ID NO: 23331 - protein, 70 aa, Synthetic construct
TPRKRKSSSETQIQESQLTNQPPCLDSSQHEAFIRSILSKPFKVPIPNYQGPLGSRALGLKRAGVRRALH

SEQ ID NO: 23332 - protein, 70 aa, Synthetic construct
TPRKRKSSSETQIQECFLSPQPPCLDSSQHEAFIRSILSKPFKVPIPNYQGPLGSRALGLKRAGVRRALH

SEQ ID NO: 23333 - protein, 70 aa, Synthetic construct
TPRKRKSSSETQIQECFLSPFRKPLDSSQHEAFIRSILSKPFKVPIPNYQGPLGSRALGLKRAGVRRALH

SEQ ID NO: 23334 - protein, 70 aa, Synthetic construct
TPRKRKSSSETQIQECFLSPFRKPLSQLTNQPPCLSILSKPFKVPIPNYQGPLGSRALGLKRAGVRRALH

SEQ ID NO: 23335 - protein, 70 aa, Synthetic construct
RKRRVLFSQAQVYELERRFKQQKYLSAPEREHLASMIHLTPTQVKIWFQNHRYKMKRQAKDKAAQQQLQQ

SEQ ID NO: 23336 - protein, 70 aa, Synthetic construct
NMAPLPSAPRRKRRVLFSQAQVYELERRFKQQKYLMIHLTPTQVKIWFQNHRYKMKRQAKDKAAQQQLQQ

SEQ ID NO: 23337 - protein, 70 aa, Synthetic construct
NMAPLPSAPRRKRRVLFSQAQVYELERRFKQQKYLSAPEREHLASMIHLTPTQVKIWFQNHRYKMKRQAK

SEQ ID NO: 23338 - protein, 70 aa, Synthetic construct
SYKAMEAASSLKSQAATKNLSDACKPLKKRNRASTAASSALGFSKSSSPSASLTENEVSDSPGDEPSESP

SEQ ID NO: 23339 - protein, 70 aa, Synthetic construct
TITDKEAASSLKSQAATKNLSDACKPLKKRNRASTAASSALGFSKSSSPSASLTENEVSDSPGDEPSESP

SEQ ID NO: 23340 - protein, 70 aa, Synthetic construct
TITDKTARTSLKSQAATKNLSDACKPLKKRNRASTAASSALGFSKSSSPSASLTENEVSDSPGDEPSESP

SEQ ID NO: 23341 - protein, 70 aa, Synthetic construct
TITDKTARTSSYKAMATKNLSDACKPLKKRNRASTAASSALGFSKSSSPSASLTENEVSDSPGDEPSESP

SEQ ID NO: 23342 - protein, 70 aa, Synthetic construct
TITDKTARTSSYKAMEAASSLKSQAATKNLSDACKPLKKRLGFSKSSSPSASLTENEVSDSPGDEPSESP

SEQ ID NO: 23343 - protein, 70 aa, Synthetic construct
TITDKTARTSSYKAMEAASSLKSQAATKNLSDACKPLKKRNRASTSSSPSASLTENEVSDSPGDEPSESP

SEQ ID NO: 23344 - protein, 70 aa, Synthetic construct
TITDKTARTSSYKAMEAASSLKSQAATKNLSDACKPLKKRNRASTAASSAASLTENEVSDSPGDEPSESP

SEQ ID NO: 23345 - protein, 70 aa, Synthetic construct
TITDKTARTSSYKAMEAASSLKSQAATKNLSDACKPLKKRNRASTAASSALGFSKNEVSDSPGDEPSESP

SEQ ID NO: 23346 - protein, 70 aa, Synthetic construct
TITDKTARTSSYKAMEAASSLKSQAATKNLSDACKPLKKRNRASTAASSALGFSKSSSPSSPGDEPSESP

SEQ ID NO: 23347 - protein, 70 aa, Synthetic construct
TITDKTARTSSYKAMEAASSLKSQAATKNLSDACKPLKKRNRASTAASSALGFSKSSSPSASLTEPSESP

SEQ ID NO: 23348 - protein, 70 aa, Synthetic construct
TITDKTARTSSYKAMEAASSLKSQAATKNLSDACKPLKKRNRASTAASSALGFSKSSSPSASLTENEVSD

SEQ ID NO: 23349 - protein, 70 aa, Synthetic construct
EEHWYLDLPEEQSFLLCEDLLYGRMSFRGFNPEVEKLMLQMNAKHKAEEVEDETVELDVSDEEMARRYET

SEQ ID NO: 23350 - protein, 70 aa, Synthetic construct
EEHWYLDLPELKEKESFIIEEQSFLLCEDLLYGRMSFRGFNPEVEKLMLQMNAKHKAEEVEDETVRRYET

SEQ ID NO: 23351 - protein, 70 aa, Synthetic construct
YKARALPTLPSSQHDWLSLDDNQFRMSILERLEQMERRMAEMTGSQQHKQASGGGSSGGGSGSGNGGSQA

SEQ ID NO: 23352 - protein, 70 aa, Synthetic construct
QIISNLPTLPSSQHDWLSLDDNQFRMSILERLEQMERRMAEMTGSQQHKQASGGGSSGGGSGSGNGGSQA

SEQ ID NO: 23353 - protein, 70 aa, Synthetic construct
QIISNSVVFESSQHDWLSLDDNQFRMSILERLEQMERRMAEMTGSQQHKQASGGGSSGGGSGSGNGGSQA

SEQ ID NO: 23354 - protein, 70 aa, Synthetic construct
QIISNSVVFEYKARAWLSLDDNQFRMSILERLEQMERRMAEMTGSQQHKQASGGGSSGGGSGSGNGGSQA

SEQ ID NO: 23355 - protein, 70 aa, Synthetic construct
QIISNSVVFEYKARALPTLPDNQFRMSILERLEQMERRMAEMTGSQQHKQASGGGSSGGGSGSGNGGSQA

SEQ ID NO: 23356 - protein, 70 aa, Synthetic construct
QIISNSVVFEYKARALPTLPSSQHDWLSLDDNQFRMSILERLEQMERRMAASGGGSSGGGSGSGNGGSQA

SEQ ID NO: 23357 - protein, 70 aa, Synthetic construct
QIISNSVVFEYKARALPTLPSSQHDWLSLDDNQFRMSILERLEQMERRMAEMTGSSSGGGSGSGNGGSQA

SEQ ID NO: 23358 - protein, 70 aa, Synthetic construct
QIISNSVVFEYKARALPTLPSSQHDWLSLDDNQFRMSILERLEQMERRMAEMTGSQQHKQSGSGNGGSQA

SEQ ID NO: 23359 - protein, 70 aa, Synthetic construct
QIISNSVVFEYKARALPTLPSSQHDWLSLDDNQFRMSILERLEQMERRMAEMTGSQQHKQASGGGGGSQA

SEQ ID NO: 23360 - protein, 70 aa, Synthetic construct
QIISNSVVFEYKARALPTLPSSQHDWLSLDDNQFRMSILERLEQMERRMAEMTGSQQHKQASGGGSSGGG

SEQ ID NO: 23361 - protein, 70 aa, Synthetic construct
TKEKYRVVYTDHQRLELEKEFHCNRYITIQRKSELAVNLGLSERQVKIWFQNRRAKERKMIKKKISQFEN

SEQ ID NO: 23362 - protein, 70 aa, Synthetic construct
KTVQVRVVYTDHQRLELEKEFHCNRYITIQRKSELAVNLGLSERQVKIWFQNRRAKERKMIKKKISQFEN

SEQ ID NO: 23363 - protein, 70 aa, Synthetic construct
KTVQVTGKTRDHQRLELEKEFHCNRYITIQRKSELAVNLGLSERQVKIWFQNRRAKERKMIKKKISQFEN

SEQ ID NO: 23364 - protein, 70 aa, Synthetic construct
KTVQVTGKTRTKEKYRVVYTDHQRLYITIQRKSELAVNLGLSERQVKIWFQNRRAKERKMIKKKISQFEN

SEQ ID NO: 23365 - protein, 70 aa, Synthetic construct
KTVQVTGKTRTKEKYRVVYTDHQRLELEKEFHCNRYITIQLSERQVKIWFQNRRAKERKMIKKKISQFEN

SEQ ID NO: 23366 - protein, 70 aa, Synthetic construct
KTVQVTGKTRTKEKYRVVYTDHQRLELEKEFHCNRYITIQRKSELAVNLGLSERQVKIWFQNRRAKERKM

SEQ ID NO: 23367 - protein, 70 aa, Synthetic construct; identical to SEQ ID NO: 15107

SEQ ID NO: 23368 - protein, 70 aa, Synthetic construct
QLDELNDEKALLEQLVSFLSGKDETELAELDRALGIDKLVQGGGLDVLSERFPPQQATPPLIMEERPNLY

SEQ ID NO: 23369 - protein, 70 aa, Synthetic construct
QLDELLCPPTLLEQLVSFLSGKDETELAELDRALGIDKLVQGGGLDVLSERFPPQQATPPLIMEERPNLY

SEQ ID NO: 23370 - protein, 70 aa, Synthetic construct
QLDELLCPPTTVEGRNDEKALLEQLVSFLSGKDETIDKLVQGGGLDVLSERFPPQQATPPLIMEERPNLY

SEQ ID NO: 23371 - protein, 70 aa, Synthetic construct
QLDELLCPPTTVEGRNDEKALLEQLVSFLSGKDETELAELQGGGLDVLSERFPPQQATPPLIMEERPNLY

SEQ ID NO: 23372 - protein, 70 aa, Synthetic construct
QLDELLCPPTTVEGRNDEKALLEQLVSFLSGKDETELAELDRALGDVLSERFPPQQATPPLIMEERPNLY

SEQ ID NO: 23373 - protein, 70 aa, Synthetic construct
QLDELLCPPTTVEGRNDEKALLEQLVSFLSGKDETELAELDRALGIDKLVRFPPQQATPPLIMEERPNLY

SEQ ID NO: 23374 - protein, 70 aa, Synthetic construct
QLDELLCPPTTVEGRNDEKALLEQLVSFLSGKDETELAELDRALGIDKLVQGGGLQATPPLIMEERPNLY

SEQ ID NO: 23375 - protein, 70 aa, Synthetic construct
QLDELLCPPTTVEGRNDEKALLEQLVSFLSGKDETELAELDRALGIDKLVQGGGLDVLSELIMEERPNLY

SEQ ID NO: 23376 - protein, 70 aa, Synthetic construct
QLDELLCPPTTVEGRNDEKALLEQLVSFLSGKDETELAELDRALGIDKLVQGGGLDVLSERFPPQRPNLY

SEQ ID NO: 23377 - protein, 70 aa, Synthetic construct
QLDELLCPPTTVEGRNDEKALLEQLVSFLSGKDETELAELDRALGIDKLVQGGGLDVLSERFPPQQATPP

SEQ ID NO: 23378 - protein, 70 aa, Synthetic construct
LELEKRRLDIEAERLQVEKERLQIEKERLRHLDMEHERLQLEKERLQIEREKLRLQIVNSEKPSLENELG

SEQ ID NO: 23379 - protein, 70 aa, Synthetic construct
HLLVNRRLDIEAERLQVEKERLQIEKERLRHLDMEHERLQLEKERLQIEREKLRLQIVNSEKPSLENELG

SEQ ID NO: 23380 - protein, 70 aa, Synthetic construct
HLLVNIEKQKLELEKRRLDIRLQIEKERLRHLDMEHERLQLEKERLQIEREKLRLQIVNSEKPSLENELG

SEQ ID NO: 23381 - protein, 70 aa, Synthetic construct
HLLVNIEKQKLELEKRRLDIEAERLQVEKEHLDMEHERLQLEKERLQIEREKLRLQIVNSEKPSLENELG

SEQ ID NO: 23382 - protein, 70 aa, Synthetic construct
HLLVNIEKQKLELEKRRLDIEAERLQVEKERLQIEHERLQLEKERLQIEREKLRLQIVNSEKPSLENELG

SEQ ID NO: 23383 - protein, 70 aa, Synthetic construct
HLLVNIEKQKLELEKRRLDIEAERLQVEKERLQIEKERLRLEKERLQIEREKLRLQIVNSEKPSLENELG

SEQ ID NO: 23384 - protein, 70 aa, Synthetic construct
HLLVNIEKQKLELEKRRLDIEAERLQVEKERLQIEKERLRHLDMELQIEREKLRLQIVNSEKPSLENELG

SEQ ID NO: 23385 - protein, 70 aa, Synthetic construct
HLLVNIEKQKLELEKRRLDIEAERLQVEKERLQIEKERLRHLDMEHERLQEKLRLQIVNSEKPSLENELG

SEQ ID NO: 23386 - protein, 70 aa, Synthetic construct
HLLVNIEKQKLELEKRRLDIEAERLQVEKERLQIEKERLRHLDMEHERLQLEKERQIVNSEKPSLENELG

SEQ ID NO: 23387 - protein, 70 aa, Synthetic construct
HLLVNIEKQKLELEKRRLDIEAERLQVEKERLQIEKERLRHLDMEHERLQLEKERLQIEREKPSLENELG

SEQ ID NO: 23388 - protein, 70 aa, Synthetic construct
HLLVNIEKQKLELEKRRLDIEAERLQVEKERLQIEKERLRHLDMEHERLQLEKERLQIEREKLRLENELG

SEQ ID NO: 23389 - protein, 70 aa, Synthetic construct
HLLVNIEKQKLELEKRRLDIEAERLQVEKERLQIEKERLRHLDMEHERLQLEKERLQIEREKLRLQIVNS

SEQ ID NO: 23390 - protein, 70 aa, Synthetic construct
EGVWSPDIEQSFQEALAIYPPCGRRKIILSDEGKMYGRNELIARYIKLRTGKTRTRKQVSSHIQVLARRK

SEQ ID NO: 23391 - protein, 70 aa, Synthetic construct
LGDSGYASQPCAKISEKGQSGKKMRKQTCQEIDEELKEAAGSLLHLAGIRTCLGSLISTAKTQNQKQRKK

SEQ ID NO: 23392 - protein, 70 aa, Synthetic construct
DTDVDYASQPCAKISEKGQSGKKMRKQTCQEIDEELKEAAGSLLHLAGIRTCLGSLISTAKTQNQKQRKK

SEQ ID NO: 23393 - protein, 70 aa, Synthetic construct
DTDVDYEDDPLGDSGEKGQSGKKMRKQTCQEIDEELKEAAGSLLHLAGIRTCLGSLISTAKTQNQKQRKK

SEQ ID NO: 23394 - protein, 70 aa, Synthetic construct
DTDVDYEDDPLGDSGYASQPGKKMRKQTCQEIDEELKEAAGSLLHLAGIRTCLGSLISTAKTQNQKQRKK

SEQ ID NO: 23395 - protein, 70 aa, Synthetic construct
DTDVDYEDDPLGDSGYASQPCAKISKQTCQEIDEELKEAAGSLLHLAGIRTCLGSLISTAKTQNQKQRKK

SEQ ID NO: 23396 - protein, 70 aa, Synthetic construct
DTDVDYEDDPLGDSGYASQPCAKISEKGQSEIDEELKEAAGSLLHLAGIRTCLGSLISTAKTQNQKQRKK

SEQ ID NO: 23397 - protein, 70 aa, Synthetic construct
DTDVDYEDDPLGDSGYASQPCAKISEKGQSGKKMRKQTCQGSLLHLAGIRTCLGSLISTAKTQNQKQRKK

SEQ ID NO: 23398 - protein, 70 aa, Synthetic construct
DTDVDYEDDPLGDSGYASQPCAKISEKGQSGKKMRKQTCQEIDEELKEAAGSLLHLAGIRTCLGSKQRKK

SEQ ID NO: 23399 - protein, 70 aa, Synthetic construct
DTDVDYEDDPLGDSGYASQPCAKISEKGQSGKKMRKQTCQEIDEELKEAAGSLLHLAGIRTCLGSLISTA

SEQ ID NO: 23400 - protein, 70 aa, Synthetic construct
ASETTFLKFGVNAILSSGPRTETSPALLQSVPPKTFAFPYFEGSFQPFIRSSYFPASSSVVPIPGTFSWP

SEQ ID NO: 23401 - protein, 70 aa, Synthetic construct
GGSPPFLKFGVNAILSSGPRTETSPALLQSVPPKTFAFPYFEGSFQPFIRSSYFPASSSVVPIPGTFSWP

SEQ ID NO: 23402 - protein, 70 aa, Synthetic construct
GGSPPTAFSPASETTFLKFGVNAILSSGPRVPPKTFAFPYFEGSFQPFIRSSYFPASSSVVPIPGTFSWP

SEQ ID NO: 23403 - protein, 70 aa, Synthetic construct
GGSPPTAFSPASETTFLKFGVNAILSSGPRTETSPFAFPYFEGSFQPFIRSSYFPASSSVVPIPGTFSWP

SEQ ID NO: 23404 - protein, 70 aa, Synthetic construct
GGSPPTAFSPASETTFLKFGVNAILSSGPRTETSPALLQSFEGSFQPFIRSSYFPASSSVVPIPGTFSWP

SEQ ID NO: 23405 - protein, 70 aa, Synthetic construct
GGSPPTAFSPASETTFLKFGVNAILSSGPRTETSPALLQSVPPKTQPFIRSSYFPASSSVVPIPGTFSWP

SEQ ID NO: 23406 - protein, 70 aa, Synthetic construct
GGSPPTAFSPASETTFLKFGVNAILSSGPRTETSPALLQSVPPKTFAFPYSSYFPASSSVVPIPGTFSWP

SEQ ID NO: 23407 - protein, 70 aa, Synthetic construct
GGSPPTAFSPASETTFLKFGVNAILSSGPRTETSPALLQSVPPKTFAFPYFEGSFASSSVVPIPGTFSWP

SEQ ID NO: 23408 - protein, 70 aa, Synthetic construct
GGSPPTAFSPASETTFLKFGVNAILSSGPRTETSPALLQSVPPKTFAFPYFEGSFQPFIRVPIPGTFSWP

SEQ ID NO: 23409 - protein, 70 aa, Synthetic construct
GGSPPTAFSPASETTFLKFGVNAILSSGPRTETSPALLQSVPPKTFAFPYFEGSFQPFIRSSYFPTFSWP

SEQ ID NO: 23410 - protein, 70 aa, Synthetic construct
GGSPPTAFSPASETTFLKFGVNAILSSGPRTETSPALLQSVPPKTFAFPYFEGSFQPFIRSSYFPASSSV

SEQ ID NO: 23411 - protein, 70 aa, Synthetic construct
PALPTQPAEEAARKREVRLMKNREAARECRRKKKEYVKCLENRVAVLENQNKTLIEELKALKDLYCHKSD

SEQ ID NO: 23412 - protein, 70 aa, Synthetic construct
IAPGVVMASSAARKREVRLMKNREAARECRRKKKEYVKCLENRVAVLENQNKTLIEELKALKDLYCHKSD

SEQ ID NO: 23413 - protein, 70 aa, Synthetic construct
IAPGVVMASSPALPTQPAEEAARKREVRLMKNREAARECRRKKKEYVKCLENRVAVLENQLKDLYCHKSD

SEQ ID NO: 23414 - protein, 70 aa, Synthetic construct
IAPGVVMASSPALPTQPAEEAARKREVRLMKNREAARECRRKKKEYVKCLENRVAVLENQNKTLIEELKA

SEQ ID NO: 23415 - protein, 70 aa, Synthetic construct
MASGDLYEVERIVDKRKNKKGKWEYLIRWKGYGSTEDTWEPEHHLNGLHMSKDKRIKSGKQSSTSKLLRD

SEQ ID NO: 23416 - protein, 70 aa, Synthetic construct
MASGDLYEVERIVDKRKNKKGKWEYLIRWKGYGSTEDTWEPEHHLLHCEESKDKRIKSGKQSSTSKLLRD

SEQ ID NO: 23417 - protein, 70 aa, Synthetic construct
MASGDLYEVERIVDKRKNKKGKWEYLIRWKGYGSTEDTWEPEHHLLHCEEFIDEFIKSGKQSSTSKLLRD

SEQ ID NO: 23418 - protein, 70 aa, Synthetic construct
MASGDLYEVERIVDKRKNKKGKWEYLIRWKGYGSTEDTWEPEHHLLHCEEFIDEFNGLHMQSSTSKLLRD

SEQ ID NO: 23419 - protein, 70 aa, Synthetic construct
MASGDLYEVERIVDKRKNKKGKWEYLIRWKGYGSTEDTWEPEHHLLHCEEFIDEFNGLHMSKDKRKLLRD

SEQ ID NO: 23420 - protein, 70 aa, Synthetic construct
MASGDLYEVERIVDKRKNKKGKWEYLIRWKGYGSTEDTWEPEHHLLHCEEFIDEFNGLHMSKDKRIKSGK

SEQ ID NO: 23421 - protein, 70 aa, Synthetic construct
KPRRARTAFTYEQLVALENKERLNLALSLSLTETQVKIWFQNRRTKWKKQNPGADGAAQVGGGAPQPGAA

SEQ ID NO: 23422 - protein, 70 aa, Synthetic construct
KPRRARTAFTYEQLVALENKFRATRALSLSLTETQVKIWFQNRRTKWKKQNPGADGAAQVGGGAPQPGAA

SEQ ID NO: 23423 - protein, 70 aa, Synthetic construct
KPRRARTAFTYEQLVALENKFRATRYLSVCLTETQVKIWFQNRRTKWKKQNPGADGAAQVGGGAPQPGAA

SEQ ID NO: 23424 - protein, 70 aa, Synthetic construct
KPRRARTAFTYEQLVALENKFRATRYLSVCERLNLALSLSLTETQVKIWFQNRRTKWKKQGGGAPQPGAA

SEQ ID NO: 23425 - protein, 70 aa, Synthetic construct
KPRRARTAFTYEQLVALENKFRATRYLSVCERLNLALSLSLTETQVKIWFQNRRTKWKKQNPGADQPGAA

SEQ ID NO: 23426 - protein, 70 aa, Synthetic construct
KPRRARTAFTYEQLVALENKFRATRYLSVCERLNLALSLSLTETQVKIWFQNRRTKWKKQNPGADGAAQV

SEQ ID NO: 23427 - protein, 70 aa, Synthetic construct
ASYNVKTAYRKYLYGFEEYCRSANIQFRTVHHHEPKVKEEKKDLEESMEEALKLDQEMPLTEVKSEPEEN

SEQ ID NO: 23428 - protein, 70 aa, Synthetic construct
DLGIPKTAYRKYLYGFEEYCRSANIQFRTVHHHEPKVKEEKKDLEESMEEALKLDQEMPLTEVKSEPEEN

SEQ ID NO: 23429 - protein, 70 aa, Synthetic construct
DLGIPILNSAKYLYGFEEYCRSANIQFRTVHHHEPKVKEEKKDLEESMEEALKLDQEMPLTEVKSEPEEN

SEQ ID NO: 23430 - protein, 70 aa, Synthetic construct
DLGIPILNSAASYNVFEEYCRSANIQFRTVHHHEPKVKEEKKDLEESMEEALKLDQEMPLTEVKSEPEEN

SEQ ID NO: 23431 - protein, 70 aa, Synthetic construct
DLGIPILNSAASYNVKTAYRRSANIQFRTVHHHEPKVKEEKKDLEESMEEALKLDQEMPLTEVKSEPEEN

SEQ ID NO: 23432 - protein, 70 aa, Synthetic construct
DLGIPILNSAASYNVKTAYRKYLYGQFRTVHHHEPKVKEEKKDLEESMEEALKLDQEMPLTEVKSEPEEN

SEQ ID NO: 23433 - protein, 70 aa, Synthetic construct
DLGIPILNSAASYNVKTAYRKYLYGFEEYCHHHEPKVKEEKKDLEESMEEALKLDQEMPLTEVKSEPEEN

SEQ ID NO: 23434 - protein, 70 aa, Synthetic construct
DLGIPILNSAASYNVKTAYRKYLYGFEEYCRSANIKVKEEKKDLEESMEEALKLDQEMPLTEVKSEPEEN

SEQ ID NO: 23435 - protein, 70 aa, Synthetic construct
DLGIPILNSAASYNVKTAYRKYLYGFEEYCRSANIQFRTVKKDLEESMEEALKLDQEMPLTEVKSEPEEN

SEQ ID NO: 23436 - protein, 70 aa, Synthetic construct
DLGIPILNSAASYNVKTAYRKYLYGFEEYCRSANIQFRTVHHHEPESMEEALKLDQEMPLTEVKSEPEEN

SEQ ID NO: 23437 - protein, 70 aa, Synthetic construct
DLGIPILNSAASYNVKTAYRKYLYGFEEYCRSANIQFRTVHHHEPKVKEEALKLDQEMPLTEVKSEPEEN

SEQ ID NO: 23438 - protein, 70 aa, Synthetic construct
DLGIPILNSAASYNVKTAYRKYLYGFEEYCRSANIQFRTVHHHEPKVKEEKKDLEQEMPLTEVKSEPEEN

SEQ ID NO: 23439 - protein, 70 aa, Synthetic construct
DLGIPILNSAASYNVKTAYRKYLYGFEEYCRSANIQFRTVHHHEPKVKEEKKDLEESMEETEVKSEPEEN

SEQ ID NO: 23440 - protein, 70 aa, Synthetic construct
DLGIPILNSAASYNVKTAYRKYLYGFEEYCRSANIQFRTVHHHEPKVKEEKKDLEESMEEALKLDQEMPL

SEQ ID NO: 23441 - protein, 70 aa, Synthetic construct
PPQRRPRKQLNPCRGTERVDPGFEGVTLKFQIKPDSSLQIIPTYSLPCSSRSQESPADAVGGPAAHPGGT

SEQ ID NO: 23442 - protein, 70 aa, Synthetic construct
RLQPPPRKQLNPCRGTERVDPGFEGVTLKFQIKPDSSLQIIPTYSLPCSSRSQESPADAVGGPAAHPGGT

SEQ ID NO: 23443 - protein, 70 aa, Synthetic construct
RLQPPGTPSAPPQRRPRKQLNPCRGTERVDPGFEGVTLKFQIKPDSSLQIRSQESPADAVGGPAAHPGGT

SEQ ID NO: 23444 - protein, 70 aa, Synthetic construct
RLQPPGTPSAPPQRRPRKQLNPCRGTERVDPGFEGVTLKFQIKPDSSLQIIPTYSLPCSSGGPAAHPGGT

SEQ ID NO: 23445 - protein, 70 aa, Synthetic construct
RLQPPGTPSAPPQRRPRKQLNPCRGTERVDPGFEGVTLKFQIKPDSSLQIIPTYSLPCSSRSQESHPGGT

SEQ ID NO: 23446 - protein, 70 aa, Synthetic construct
RLQPPGTPSAPPQRRPRKQLNPCRGTERVDPGFEGVTLKFQIKPDSSLQIIPTYSLPCSSRSQESPADAV

SEQ ID NO: 23447 - protein, 70 aa, Synthetic construct
PLSSTGFYPSYGMPYSPSPLTAAPIGLGYYGRYPPTLYPPPPSPSFTTPLPPPSYMHAGHLLLNPAKYHK

SEQ ID NO: 23448 - protein, 70 aa, Synthetic construct
EMPFMGFYPSYGMPYSPSPLTAAPIGLGYYGRYPPTLYPPPPSPSFTTPLPPPSYMHAGHLLLNPAKYHK

SEQ ID NO: 23449 - protein, 70 aa, Synthetic construct
EMPFMHSLSFYGMPYSPSPLTAAPIGLGYYGRYPPTLYPPPPSPSFTTPLPPPSYMHAGHLLLNPAKYHK

SEQ ID NO: 23450 - protein, 70 aa, Synthetic construct
EMPFMHSLSFPLSSTGFYPSTAAPIGLGYYGRYPPTLYPPPPSPSFTTPLPPPSYMHAGHLLLNPAKYHK

SEQ ID NO: 23451 - protein, 70 aa, Synthetic construct
EMPFMHSLSFPLSSTGFYPSYGMPYGLGYYGRYPPTLYPPPPSPSFTTPLPPPSYMHAGHLLLNPAKYHK

SEQ ID NO: 23452 - protein, 70 aa, Synthetic construct
EMPFMHSLSFPLSSTGFYPSYGMPYSPSPLTAAPIGLGYYPPSPSFTTPLPPPSYMHAGHLLLNPAKYHK

SEQ ID NO: 23453 - protein, 70 aa, Synthetic construct
EMPFMHSLSFPLSSTGFYPSYGMPYSPSPLTAAPIGLGYYGRYPPFTTPLPPPSYMHAGHLLLNPAKYHK

SEQ ID NO: 23454 - protein, 70 aa, Synthetic construct
EMPFMHSLSFPLSSTGFYPSYGMPYSPSPLTAAPIGLGYYGRYPPTLYPPPPPSYMHAGHLLLNPAKYHK

SEQ ID NO: 23455 - protein, 70 aa, Synthetic construct
EMPFMHSLSFPLSSTGFYPSYGMPYSPSPLTAAPIGLGYYGRYPPTLYPPPPSPSMHAGHLLLNPAKYHK

SEQ ID NO: 23456 - protein, 70 aa, Synthetic construct
EMPFMHSLSFPLSSTGFYPSYGMPYSPSPLTAAPIGLGYYGRYPPTLYPPPPSPSFTTPLLLLNPAKYHK

SEQ ID NO: 23457 - protein, 70 aa, Synthetic construct
EMPFMHSLSFPLSSTGFYPSYGMPYSPSPLTAAPIGLGYYGRYPPTLYPPPPSPSFTTPLPPPSYAKYHK

SEQ ID NO: 23458 - protein, 70 aa, Synthetic construct
EMPFMHSLSFPLSSTGFYPSYGMPYSPSPLTAAPIGLGYYGRYPPTLYPPPPSPSFTTPLPPPSYMHAGH

SEQ ID NO: 23459 - protein, 70 aa, Synthetic construct
RHEASAQIDEIVGETASEADSSETSVSEKENGHEKDDDVIRCICGLYKDEGLMIQCDKCMVWQHCDCMGV

SEQ ID NO: 23460 - protein, 70 aa, Synthetic construct
CRLRKAQIDEIVGETASEADSSETSVSEKENGHEKDDDVIRCICGLYKDEGLMIQCDKCMVWQHCDCMGV

SEQ ID NO: 23461 - protein, 70 aa, Synthetic construct
CRLRKAYYNAIVGETASEADSSETSVSEKENGHEKDDDVIRCICGLYKDEGLMIQCDKCMVWQHCDCMGV

SEQ ID NO: 23462 - protein, 70 aa, Synthetic construct
CRLRKAYYNARHEASASEADSSETSVSEKENGHEKDDDVIRCICGLYKDEGLMIQCDKCMVWQHCDCMGV

SEQ ID NO: 23463 - protein, 70 aa, Synthetic construct
CRLRKAYYNARHEASAQIDESSETSVSEKENGHEKDDDVIRCICGLYKDEGLMIQCDKCMVWQHCDCMGV

SEQ ID NO: 23464 - protein, 70 aa, Synthetic construct
CRLRKAYYNARHEASAQIDEIVGETVSEKENGHEKDDDVIRCICGLYKDEGLMIQCDKCMVWQHCDCMGV

SEQ ID NO: 23465 - protein, 70 aa, Synthetic construct
CRLRKAYYNARHEASAQIDEIVGETASEADNGHEKDDDVIRCICGLYKDEGLMIQCDKCMVWQHCDCMGV

SEQ ID NO: 23466 - protein, 70 aa, Synthetic construct
CRLRKAYYNARHEASAQIDEIVGETASEADSSETSDDDVIRCICGLYKDEGLMIQCDKCMVWQHCDCMGV

SEQ ID NO: 23467 - protein, 70 aa, Synthetic construct
EGATANVSEGEKKTEESSQEPQSTCTPEERRHNQRERLNQILLNLLEKIPGKNAIDVTYLLEEGSGRKLR

SEQ ID NO: 23468 - protein, 70 aa, Synthetic construct
EIPSLNVSEGEKKTEESSQEPQSTCTPEERRHNQRERLNQILLNLLEKIPGKNAIDVTYLLEEGSGRKLR

SEQ ID NO: 23469 - protein, 70 aa, Synthetic construct
EIPSLEEPEREKKTEESSQEPQSTCTPEERRHNQRERLNQILLNLLEKIPGKNAIDVTYLLEEGSGRKLR

SEQ ID NO: 23470 - protein, 70 aa, Synthetic construct
EIPSLEEPEREGATAESSQEPQSTCTPEERRHNQRERLNQILLNLLEKIPGKNAIDVTYLLEEGSGRKLR

SEQ ID NO: 23471 - protein, 70 aa, Synthetic construct
EIPSLEEPEREGATANVSEGPQSTCTPEERRHNQRERLNQILLNLLEKIPGKNAIDVTYLLEEGSGRKLR

SEQ ID NO: 23472 - protein, 70 aa, Synthetic construct
EIPSLEEPEREGATANVSEGEKKTETPEERRHNQRERLNQILLNLLEKIPGKNAIDVTYLLEEGSGRKLR

SEQ ID NO: 23473 - protein, 70 aa, Synthetic construct
DVAVEFSQEEWKCLDPVQKALYRDVMLENYRNLGFLGLCLPDLNIISMLEQGKEPWTVVSQVKIARNPNC

SEQ ID NO: 23474 - protein, 70 aa, Synthetic construct
ALPQGSLTFRDVAVEFSQEEWKCLDPVQKALYRDVMLENYRNLGFISMLEQGKEPWTVVSQVKIARNPNC

SEQ ID NO: 23475 - protein, 70 aa, Synthetic construct
ALPQGSLTFRDVAVEFSQEEWKCLDPVQKALYRDVMLENYRNLGFLGLCLQGKEPWTVVSQVKIARNPNC

SEQ ID NO: 23476 - protein, 70 aa, Synthetic construct
ALPQGSLTFRDVAVEFSQEEWKCLDPVQKALYRDVMLENYRNLGFLGLCLPDLNIWTVVSQVKIARNPNC

SEQ ID NO: 23477 - protein, 70 aa, Synthetic construct
ALPQGSLTFRDVAVEFSQEEWKCLDPVQKALYRDVMLENYRNLGFLGLCLPDLNIISMLEQVKIARNPNC

SEQ ID NO: 23478 - protein, 70 aa, Synthetic construct
ALPQGSLTFRDVAVEFSQEEWKCLDPVQKALYRDVMLENYRNLGFLGLCLPDLNIISMLEQGKEPRNPNC

SEQ ID NO: 23479 - protein, 70 aa, Synthetic construct
ALPQGSLTFRDVAVEFSQEEWKCLDPVQKALYRDVMLENYRNLGFLGLCLPDLNIISMLEQGKEPWTVVS

SEQ ID NO: 23480 - protein, 70 aa, Synthetic construct
LLFQLSVHERELDLVFLDHSYAKPWSAHPDASSARPTRMLFVTPRRQHESTIESDVPIDVETVTSTPMPL

SEQ ID NO: 23481 - protein, 70 aa, Synthetic construct
QTSARSVHERELDLVFLDHSYAKPWSAHPDASSARPTRMLFVTPRRQHESTIESDVPIDVETVTSTPMPL

SEQ ID NO: 23482 - protein, 70 aa, Synthetic construct
QTSARRMGTSELDLVFLDHSYAKPWSAHPDASSARPTRMLFVTPRRQHESTIESDVPIDVETVTSTPMPL

SEQ ID NO: 23483 - protein, 70 aa, Synthetic construct
QTSARRMGTSLLFQLSVHERELDLVFLDHSYAKPWPTRMLFVTPRRQHESTIESDVPIDVETVTSTPMPL

SEQ ID NO: 23484 - protein, 70 aa, Synthetic construct
QTSARRMGTSLLFQLSVHERELDLVFLDHSYAKPWSAHPDASSARRQHESTIESDVPIDVETVTSTPMPL

SEQ ID NO: 23485 - protein, 70 aa, Synthetic construct
QTSARRMGTSLLFQLSVHERELDLVFLDHSYAKPWSAHPDASSARPTRMLTIESDVPIDVETVTSTPMPL

SEQ ID NO: 23486 - protein, 70 aa, Synthetic construct
QTSARRMGTSLLFQLSVHERELDLVFLDHSYAKPWSAHPDASSARPTRMLFVTPRVPIDVETVTSTPMPL

SEQ ID NO: 23487 - protein, 70 aa, Synthetic construct
QTSARRMGTSLLFQLSVHERELDLVFLDHSYAKPWSAHPDASSARPTRMLFVTPRRQHESETVTSTPMPL

SEQ ID NO: 23488 - protein, 70 aa, Synthetic construct
QTSARRMGTSLLFQLSVHERELDLVFLDHSYAKPWSAHPDASSARPTRMLFVTPRRQHESTIESDTPMPL

SEQ ID NO: 23489 - protein, 70 aa, Synthetic construct
QTSARRMGTSLLFQLSVHERELDLVFLDHSYAKPWSAHPDASSARPTRMLFVTPRRQHESTIESDVPIDV

SEQ ID NO: 23490 - protein, 70 aa, Synthetic construct
KCDSNVSSSKKRRHRTTFTSLQLEELEKVFQKTHYPDVYVREQLALRTELTEARVQVWFQNRRAKWRKRE

SEQ ID NO: 23491 - protein, 70 aa, Synthetic construct
EKGELVSSSKKRRHRTTFTSLQLEELEKVFQKTHYPDVYVREQLALRTELTEARVQVWFQNRRAKWRKRE

SEQ ID NO: 23492 - protein, 70 aa, Synthetic construct
YCLAEVSPLRFRCTECQDIELCPECFSAGAEIGHHRRYHGYQLVDGGRFTLWGPEAEGGWTSREEQLLLD

SEQ ID NO: 23493 - protein, 70 aa, Synthetic construct
MAELGVSPLRFRCTECQDIELCPECFSAGAEIGHHRRYHGYQLVDGGRFTLWGPEAEGGWTSREEQLLLD

SEQ ID NO: 23494 - protein, 70 aa, Synthetic construct
MAELGKKYCVFRCTECQDIELCPECFSAGAEIGHHRRYHGYQLVDGGRFTLWGPEAEGGWTSREEQLLLD

SEQ ID NO: 23495 - protein, 70 aa, Synthetic construct
MAELGKKYCVYCLAECQDIELCPECFSAGAEIGHHRRYHGYQLVDGGRFTLWGPEAEGGWTSREEQLLLD

SEQ ID NO: 23496 - protein, 70 aa, Synthetic construct
MAELGKKYCVYCLAEVSPLRLCPECFSAGAEIGHHRRYHGYQLVDGGRFTLWGPEAEGGWTSREEQLLLD

SEQ ID NO: 23497 - protein, 70 aa, Synthetic construct
MAELGKKYCVYCLAEVSPLRFRCTEFSAGAEIGHHRRYHGYQLVDGGRFTLWGPEAEGGWTSREEQLLLD

SEQ ID NO: 23498 - protein, 70 aa, Synthetic construct
MAELGKKYCVYCLAEVSPLRFRCTECQDIEEIGHHRRYHGYQLVDGGRFTLWGPEAEGGWTSREEQLLLD

SEQ ID NO: 23499 - protein, 70 aa, Synthetic construct
MAELGKKYCVYCLAEVSPLRFRCTECQDIELCPECRRYHGYQLVDGGRFTLWGPEAEGGWTSREEQLLLD

SEQ ID NO: 23500 - protein, 70 aa, Synthetic construct
MAELGKKYCVYCLAEVSPLRFRCTECQDIELCPECFSAGAYQLVDGGRFTLWGPEAEGGWTSREEQLLLD

SEQ ID NO: 23501 - protein, 70 aa, Synthetic construct
MAELGKKYCVYCLAEVSPLRFRCTECQDIELCPECFSAGAEIGHHGGRFTLWGPEAEGGWTSREEQLLLD

SEQ ID NO: 23502 - protein, 70 aa, Synthetic construct
MAELGKKYCVYCLAEVSPLRFRCTECQDIELCPECFSAGAEIGHHRRYHGLWGPEAEGGWTSREEQLLLD

SEQ ID NO: 23503 - protein, 70 aa, Synthetic construct
MAELGKKYCVYCLAEVSPLRFRCTECQDIELCPECFSAGAEIGHHRRYHGYQLVDAEGGWTSREEQLLLD

SEQ ID NO: 23504 - protein, 70 aa, Synthetic construct
MAELGKKYCVYCLAEVSPLRFRCTECQDIELCPECFSAGAEIGHHRRYHGYQLVDGGRFTTSREEQLLLD

SEQ ID NO: 23505 - protein, 70 aa, Synthetic construct
MAELGKKYCVYCLAEVSPLRFRCTECQDIELCPECFSAGAEIGHHRRYHGYQLVDGGRFTLWGPEQLLLD

SEQ ID NO: 23506 - protein, 70 aa, Synthetic construct
MAELGKKYCVYCLAEVSPLRFRCTECQDIELCPECFSAGAEIGHHRRYHGYQLVDGGRFTLWGPEAEGGW

SEQ ID NO: 23507 - protein, 70 aa, Synthetic construct
KTELLESEQGSPNVHNYPDMEAVPLLLNNVKGEPPEDSLSVDHFQTQTEPVDLSINKARTSPTAVSSSPV

SEQ ID NO: 23508 - protein, 70 aa, Synthetic construct
MLDGMESEQGSPNVHNYPDMEAVPLLLNNVKGEPPEDSLSVDHFQTQTEPVDLSINKARTSPTAVSSSPV

SEQ ID NO: 23509 - protein, 70 aa, Synthetic construct
MLDGMPAVRVSPNVHNYPDMEAVPLLLNNVKGEPPEDSLSVDHFQTQTEPVDLSINKARTSPTAVSSSPV

SEQ ID NO: 23510 - protein, 70 aa, Synthetic construct
MLDGMPAVRVKTELLNYPDMEAVPLLLNNVKGEPPEDSLSVDHFQTQTEPVDLSINKARTSPTAVSSSPV

SEQ ID NO: 23511 - protein, 70 aa, Synthetic construct
MLDGMPAVRVKTELLESEQGEAVPLLLNNVKGEPPEDSLSVDHFQTQTEPVDLSINKARTSPTAVSSSPV

SEQ ID NO: 23512 - protein, 70 aa, Synthetic construct
MLDGMPAVRVKTELLESEQGSPNVHLLNNVKGEPPEDSLSVDHFQTQTEPVDLSINKARTSPTAVSSSPV

SEQ ID NO: 23513 - protein, 70 aa, Synthetic construct
MLDGMPAVRVKTELLESEQGSPNVHNYPDMKGEPPEDSLSVDHFQTQTEPVDLSINKARTSPTAVSSSPV

SEQ ID NO: 23514 - protein, 70 aa, Synthetic construct
MLDGMPAVRVKTELLESEQGSPNVHNYPDMEAVPLEDSLSVDHFQTQTEPVDLSINKARTSPTAVSSSPV

SEQ ID NO: 23515 - protein, 70 aa, Synthetic construct
MLDGMPAVRVKTELLESEQGSPNVHNYPDMEAVPLLLNNVVDHFQTQTEPVDLSINKARTSPTAVSSSPV

SEQ ID NO: 23516 - protein, 70 aa, Synthetic construct
MLDGMPAVRVKTELLESEQGSPNVHNYPDMEAVPLLLNNVKGEPPTQTEPVDLSINKARTSPTAVSSSPV

SEQ ID NO: 23517 - protein, 70 aa, Synthetic construct
MLDGMPAVRVKTELLESEQGSPNVHNYPDMEAVPLLLNNVKGEPPEDSLSVDLSINKARTSPTAVSSSPV

SEQ ID NO: 23518 - protein, 70 aa, Synthetic construct
MLDGMPAVRVKTELLESEQGSPNVHNYPDMEAVPLLLNNVKGEPPEDSLSVDHFQNKARTSPTAVSSSPV

SEQ ID NO: 23519 - protein, 70 aa, Synthetic construct
MLDGMPAVRVKTELLESEQGSPNVHNYPDMEAVPLLLNNVKGEPPEDSLSVDHFQTQTEPSPTAVSSSPV

SEQ ID NO: 23520 - protein, 70 aa, Synthetic construct
MLDGMPAVRVKTELLESEQGSPNVHNYPDMEAVPLLLNNVKGEPPEDSLSVDHFQTQTEPVDLSISSSPV

SEQ ID NO: 23521 - protein, 70 aa, Synthetic construct
MLDGMPAVRVKTELLESEQGSPNVHNYPDMEAVPLLLNNVKGEPPEDSLSVDHFQTQTEPVDLSINKART

SEQ ID NO: 23522 - protein, 70 aa, Synthetic construct
RRARTGPAGGQRQSASEREKLRMRTLARALHELRRFLPPSLAPAGQSLTKIETLRLAIRYIGHLSAVLGL

SEQ ID NO: 23523 - protein, 70 aa, Synthetic construct
RAAEAGPAGGQRQSASEREKLRMRTLARALHELRRFLPPSLAPAGQSLTKIETLRLAIRYIGHLSAVLGL

SEQ ID NO: 23524 - protein, 70 aa, Synthetic construct
RAAEAAATTPQRQSASEREKLRMRTLARALHELRRFLPPSLAPAGQSLTKIETLRLAIRYIGHLSAVLGL

SEQ ID NO: 23525 - protein, 70 aa, Synthetic construct
RAAEAAATTPRRARTSEREKLRMRTLARALHELRRFLPPSLAPAGQSLTKIETLRLAIRYIGHLSAVLGL

SEQ ID NO: 23526 - protein, 70 aa, Synthetic construct
RAAEAAATTPRRARTGPAGGLRMRTLARALHELRRFLPPSLAPAGQSLTKIETLRLAIRYIGHLSAVLGL

SEQ ID NO: 23527 - protein, 70 aa, Synthetic construct
RAAEAAATTPRRARTGPAGGQRQSALARALHELRRFLPPSLAPAGQSLTKIETLRLAIRYIGHLSAVLGL

SEQ ID NO: 23528 - protein, 70 aa, Synthetic construct
RAAEAAATTPRRARTGPAGGQRQSASEREKLRMRTLARALHELRRQSLTKIETLRLAIRYIGHLSAVLGL

SEQ ID NO: 23529 - protein, 70 aa, Synthetic construct
RAAEAAATTPRRARTGPAGGQRQSASEREKLRMRTLARALHELRRFLPPSIETLRLAIRYIGHLSAVLGL

SEQ ID NO: 23530 - protein, 70 aa, Synthetic construct
AKMPDEPLEPGPLPVSTAMPPGLAKSSSESSSEESSSESSSEEEEEEDEEDEEEEESESSDSEEERAHRL

SEQ ID NO: 23531 - protein, 70 aa, Synthetic construct
KLQDVEPLEPGPLPVSTAMPPGLAKSSSESSSEESSSESSSEEEEEEDEEDEEEEESESSDSEEERAHRL

SEQ ID NO: 23532 - protein, 70 aa, Synthetic construct
KLQDVFEFRYGPLPVSTAMPPGLAKSSSESSSEESSSESSSEEEEEEDEEDEEEEESESSDSEEERAHRL

SEQ ID NO: 23533 - protein, 70 aa, Synthetic construct
KLQDVFEFRYAKMPDEPLEPPGLAKSSSESSSEESSSESSSEEEEEEDEEDEEEEESESSDSEEERAHRL

SEQ ID NO: 23534 - protein, 70 aa, Synthetic construct
NLKEEPQSSEEESMSSVETRTLIKSEPVSPKNGVLPQATGDQKSGGKCETDRRMVAARTEPLTPNPASKK

SEQ ID NO: 23535 - protein, 70 aa, Synthetic construct
ILEEMPQSSEEESMSSVETRTLIKSEPVSPKNGVLPQATGDQKSGGKCETDRRMVAARTEPLTPNPASKK

SEQ ID NO: 23536 - protein, 70 aa, Synthetic construct
ILEEMKVKSEEESMSSVETRTLIKSEPVSPKNGVLPQATGDQKSGGKCETDRRMVAARTEPLTPNPASKK

SEQ ID NO: 23537 - protein, 70 aa, Synthetic construct
ILEEMKVKSENLKEESVETRTLIKSEPVSPKNGVLPQATGDQKSGGKCETDRRMVAARTEPLTPNPASKK

SEQ ID NO: 23538 - protein, 70 aa, Synthetic construct
ILEEMKVKSENLKEEPQSSETLIKSEPVSPKNGVLPQATGDQKSGGKCETDRRMVAARTEPLTPNPASKK

SEQ ID NO: 23539 - protein, 70 aa, Synthetic construct
ILEEMKVKSENLKEEPQSSEEESMSEPVSPKNGVLPQATGDQKSGGKCETDRRMVAARTEPLTPNPASKK

SEQ ID NO: 23540 - protein, 70 aa, Synthetic construct
ILEEMKVKSENLKEEPQSSEEESMSSVETRKNGVLPQATGDQKSGGKCETDRRMVAARTEPLTPNPASKK

SEQ ID NO: 23541 - protein, 70 aa, Synthetic construct
ILEEMKVKSENLKEEPQSSEEESMSSVETRTLIKSPQATGDQKSGGKCETDRRMVAARTEPLTPNPASKK

SEQ ID NO: 23542 - protein, 70 aa, Synthetic construct
ILEEMKVKSENLKEEPQSSEEESMSSVETRTLIKSEPVSPDQKSGGKCETDRRMVAARTEPLTPNPASKK

SEQ ID NO: 23543 - protein, 70 aa, Synthetic construct
ILEEMKVKSENLKEEPQSSEEESMSSVETRTLIKSEPVSPKNGVLGKCETDRRMVAARTEPLTPNPASKK

SEQ ID NO: 23544 - protein, 70 aa, Synthetic construct
ILEEMKVKSENLKEEPQSSEEESMSSVETRTLIKSEPVSPKNGVLPQATGDRRMVAARTEPLTPNPASKK

SEQ ID NO: 23545 - protein, 70 aa, Synthetic construct
ILEEMKVKSENLKEEPQSSEEESMSSVETRTLIKSEPVSPKNGVLPQATGDQKSGAARTEPLTPNPASKK

SEQ ID NO: 23546 - protein, 70 aa, Synthetic construct
ILEEMKVKSENLKEEPQSSEEESMSSVETRTLIKSEPVSPKNGVLPQATGDQKSGGKCETPLTPNPASKK

SEQ ID NO: 23547 - protein, 70 aa, Synthetic construct
ILEEMKVKSENLKEEPQSSEEESMSSVETRTLIKSEPVSPKNGVLPQATGDQKSGGKCETDRRMVPASKK

SEQ ID NO: 23548 - protein, 70 aa, Synthetic construct
ILEEMKVKSENLKEEPQSSEEESMSSVETRTLIKSEPVSPKNGVLPQATGDQKSGGKCETDRRMVAARTE

SEQ ID NO: 23549 - protein, 70 aa, Synthetic construct
GSNRTPVFSFLDLTYWKRQKICCGIIYKGRFGEVLIDTHLFKPCCSNKKAAAEKPEEQGPEPLPISTQEW

SEQ ID NO: 23550 - protein, 70 aa, Synthetic construct
DDGSDPVFSFLDLTYWKRQKICCGIIYKGRFGEVLIDTHLFKPCCSNKKAAAEKPEEQGPEPLPISTQEW

SEQ ID NO: 23551 - protein, 70 aa, Synthetic construct
DDGSDTEMASLDLTYWKRQKICCGIIYKGRFGEVLIDTHLFKPCCSNKKAAAEKPEEQGPEPLPISTQEW

SEQ ID NO: 23552 - protein, 70 aa, Synthetic construct
DDGSDTEMASGSNRTPVFSFLDLTYWKRQKICCGIIYKGRFGEVLIDTHLAAEKPEEQGPEPLPISTQEW

SEQ ID NO: 23553 - protein, 70 aa, Synthetic construct
DDGSDTEMASGSNRTPVFSFLDLTYWKRQKICCGIIYKGRFGEVLIDTHLFKPCCEEQGPEPLPISTQEW

SEQ ID NO: 23554 - protein, 70 aa, Synthetic construct
DDGSDTEMASGSNRTPVFSFLDLTYWKRQKICCGIIYKGRFGEVLIDTHLFKPCCSNKKAEPLPISTQEW

SEQ ID NO: 23555 - protein, 70 aa, Synthetic construct
DDGSDTEMASGSNRTPVFSFLDLTYWKRQKICCGIIYKGRFGEVLIDTHLFKPCCSNKKAAAEKPSTQEW

SEQ ID NO: 23556 - protein, 70 aa, Synthetic construct
DDGSDTEMASGSNRTPVFSFLDLTYWKRQKICCGIIYKGRFGEVLIDTHLFKPCCSNKKAAAEKPEEQGP

SEQ ID NO: 23557 - protein, 70 aa, Synthetic construct
GQQGWDRKYIVLEGSKVLIYDNEAREAGQRPVEEFELCLPDGDVSIHGAVGASELANTAKADVPYILKME

SEQ ID NO: 23558 - protein, 70 aa, Synthetic construct
WMKVPDRKYIVLEGSKVLIYDNEAREAGQRPVEEFELCLPDGDVSIHGAVGASELANTAKADVPYILKME

SEQ ID NO: 23559 - protein, 70 aa, Synthetic construct
WMKVPRNNKRGQQGWDRKYIVLEGSKVLIYPVEEFELCLPDGDVSIHGAVGASELANTAKADVPYILKME

SEQ ID NO: 23560 - protein, 70 aa, Synthetic construct
WMKVPRNNKRGQQGWDRKYIVLEGSKVLIYDNEAREAGQRPVEEFELCLPGASELANTAKADVPYILKME

SEQ ID NO: 23561 - protein, 70 aa, Synthetic construct
WMKVPRNNKRGQQGWDRKYIVLEGSKVLIYDNEAREAGQRPVEEFELCLPDGDVSANTAKADVPYILKME

SEQ ID NO: 23562 - protein, 70 aa, Synthetic construct
WMKVPRNNKRGQQGWDRKYIVLEGSKVLIYDNEAREAGQRPVEEFELCLPDGDVSIHGAVADVPYILKME

SEQ ID NO: 23563 - protein, 70 aa, Synthetic construct
WMKVPRNNKRGQQGWDRKYIVLEGSKVLIYDNEAREAGQRPVEEFELCLPDGDVSIHGAVGASELILKME

SEQ ID NO: 23564 - protein, 70 aa, Synthetic construct
WMKVPRNNKRGQQGWDRKYIVLEGSKVLIYDNEAREAGQRPVEEFELCLPDGDVSIHGAVGASELANTAK

SEQ ID NO: 23565 - protein, 70 aa, Synthetic construct
WPSVPISTPSEDRPGKEPSAPEKKEDALMPPKLRLKRRWNDDPEARELSKSGKFLWNGSGPQGLATAAAD

SEQ ID NO: 23566 - protein, 70 aa, Synthetic construct
WPSVPISTPSGEPLEVTEDSEDRPGKEPSAPEKKEDALMPPKLRLKRRWNSGKFLWNGSGPQGLATAAAD

SEQ ID NO: 23567 - protein, 70 aa, Synthetic construct
WPSVPISTPSGEPLEVTEDSEDRPGKEPSAPEKKEDALMPPKLRLKRRWNDDPEAWNGSGPQGLATAAAD

SEQ ID NO: 23568 - protein, 70 aa, Synthetic construct
WPSVPISTPSGEPLEVTEDSEDRPGKEPSAPEKKEDALMPPKLRLKRRWNDDPEARELSKSGKFLWNGSG

SEQ ID NO: 23569 - protein, 70 aa, Synthetic construct
PLTPFSIEDILNKPSVRRSYSLCGAAHLLAAADKHAQGGLPLAGRALLSQTSPLCALEELASKTFKGLEV

SEQ ID NO: 23570 - protein, 70 aa, Synthetic construct
HLPPPANSNKPLTPFSIEDILNKPSAHLLAAADKHAQGGLPLAGRALLSQTSPLCALEELASKTFKGLEV

SEQ ID NO: 23571 - protein, 70 aa, Synthetic construct
HLPPPANSNKPLTPFSIEDILNKPSVRRSYAADKHAQGGLPLAGRALLSQTSPLCALEELASKTFKGLEV

SEQ ID NO: 23572 - protein, 70 aa, Synthetic construct
HLPPPANSNKPLTPFSIEDILNKPSVRRSYSLCGAAQGGLPLAGRALLSQTSPLCALEELASKTFKGLEV

SEQ ID NO: 23573 - protein, 70 aa, Synthetic construct
HLPPPANSNKPLTPFSIEDILNKPSVRRSYSLCGAAHLLAPLAGRALLSQTSPLCALEELASKTFKGLEV

SEQ ID NO: 23574 - protein, 70 aa, Synthetic construct
HLPPPANSNKPLTPFSIEDILNKPSVRRSYSLCGAAHLLAAADKHALLSQTSPLCALEELASKTFKGLEV

SEQ ID NO: 23575 - protein, 70 aa, Synthetic construct
HLPPPANSNKPLTPFSIEDILNKPSVRRSYSLCGAAHLLAAADKHAQGGLTSPLCALEELASKTFKGLEV

SEQ ID NO: 23576 - protein, 70 aa, Synthetic construct
HLPPPANSNKPLTPFSIEDILNKPSVRRSYSLCGAAHLLAAADKHAQGGLPLAGRALEELASKTFKGLEV

SEQ ID NO: 23577 - protein, 70 aa, Synthetic construct
HLPPPANSNKPLTPFSIEDILNKPSVRRSYSLCGAAHLLAAADKHAQGGLPLAGRALLSQASKTFKGLEV

SEQ ID NO: 23578 - protein, 70 aa, Synthetic construct
HLPPPANSNKPLTPFSIEDILNKPSVRRSYSLCGAAHLLAAADKHAQGGLPLAGRALLSQTSPLCKGLEV

SEQ ID NO: 23579 - protein, 70 aa, Synthetic construct
HLPPPANSNKPLTPFSIEDILNKPSVRRSYSLCGAAHLLAAADKHAQGGLPLAGRALLSQTSPLCALEEL

SEQ ID NO: 23580 - protein, 70 aa, Synthetic construct
NTMSGSQELQWMVQPHFLGPSSYPRPLTYPQYSPPQPRPGVIRALGPPPGVRRRPCEQISPEEEERRRVR

SEQ ID NO: 23581 - protein, 70 aa, Synthetic construct
QQKFHSQELQWMVQPHFLGPSSYPRPLTYPQYSPPQPRPGVIRALGPPPGVRRRPCEQISPEEEERRRVR

SEQ ID NO: 23582 - protein, 70 aa, Synthetic construct
QQKFHLVPSIWMVQPHFLGPSSYPRPLTYPQYSPPQPRPGVIRALGPPPGVRRRPCEQISPEEEERRRVR

SEQ ID NO: 23583 - protein, 70 aa, Synthetic construct
QQKFHLVPSINTMSGSQELQSSYPRPLTYPQYSPPQPRPGVIRALGPPPGVRRRPCEQISPEEEERRRVR

SEQ ID NO: 23584 - protein, 70 aa, Synthetic construct
QQKFHLVPSINTMSGSQELQWMVQPPLTYPQYSPPQPRPGVIRALGPPPGVRRRPCEQISPEEEERRRVR

SEQ ID NO: 23585 - protein, 70 aa, Synthetic construct
QQKFHLVPSINTMSGSQELQWMVQPHFLGPQYSPPQPRPGVIRALGPPPGVRRRPCEQISPEEEERRRVR

SEQ ID NO: 23586 - protein, 70 aa, Synthetic construct
QQKFHLVPSINTMSGSQELQWMVQPHFLGPSSYPRQPRPGVIRALGPPPGVRRRPCEQISPEEEERRRVR

SEQ ID NO: 23587 - protein, 70 aa, Synthetic construct
QQKFHLVPSINTMSGSQELQWMVQPHFLGPSSYPRPLTYPQYSPPQPRPGVIRALCEQISPEEEERRRVR

SEQ ID NO: 23588 - protein, 70 aa, Synthetic construct
QQKFHLVPSINTMSGSQELQWMVQPHFLGPSSYPRPLTYPQYSPPQPRPGVIRALGPPPGPEEEERRRVR

SEQ ID NO: 23589 - protein, 70 aa, Synthetic construct
QQKFHLVPSINTMSGSQELQWMVQPHFLGPSSYPRPLTYPQYSPPQPRPGVIRALGPPPGVRRRPCEQIS

SEQ ID NO: 23590 - protein, 70 aa, Synthetic construct
QPQQQQPPPPPRAGALQPPASGTRVVPNPHHSGSAPAPSSKDLKFGIDRILSAEFDPKVKEGNTLRDLTS

SEQ ID NO: 23591 - protein, 70 aa, Synthetic construct
HHPQQQPPPPPRAGALQPPASGTRVVPNPHHSGSAPAPSSKDLKFGIDRILSAEFDPKVKEGNTLRDLTS

SEQ ID NO: 23592 - protein, 70 aa, Synthetic construct
HHPQQQQQQQPRAGALQPPASGTRVVPNPHHSGSAPAPSSKDLKFGIDRILSAEFDPKVKEGNTLRDLTS

SEQ ID NO: 23593 - protein, 70 aa, Synthetic construct
HHPQQQQQQQQPQQQLQPPASGTRVVPNPHHSGSAPAPSSKDLKFGIDRILSAEFDPKVKEGNTLRDLTS

SEQ ID NO: 23594 - protein, 70 aa, Synthetic construct
HHPQQQQQQQQPQQQQPPPPSGTRVVPNPHHSGSAPAPSSKDLKFGIDRILSAEFDPKVKEGNTLRDLTS

SEQ ID NO: 23595 - protein, 70 aa, Synthetic construct
HHPQQQQQQQQPQQQQPPPPPRAGAVPNPHHSGSAPAPSSKDLKFGIDRILSAEFDPKVKEGNTLRDLTS

SEQ ID NO: 23596 - protein, 70 aa, Synthetic construct
HHPQQQQQQQQPQQQQPPPPPRAGALQPPAHSGSAPAPSSKDLKFGIDRILSAEFDPKVKEGNTLRDLTS

SEQ ID NO: 23597 - protein, 70 aa, Synthetic construct
HHPQQQQQQQQPQQQQPPPPPRAGALQPPASGTRVPAPSSKDLKFGIDRILSAEFDPKVKEGNTLRDLTS

SEQ ID NO: 23598 - protein, 70 aa, Synthetic construct
HHPQQQQQQQQPQQQQPPPPPRAGALQPPASGTRVVPNPHKDLKFGIDRILSAEFDPKVKEGNTLRDLTS

SEQ ID NO: 23599 - protein, 70 aa, Synthetic construct
HHPQQQQQQQQPQQQQPPPPPRAGALQPPASGTRVVPNPHHSGSAPAPSSKDLKFGIDRILSAEFRDLTS

SEQ ID NO: 23600 - protein, 70 aa, Synthetic construct
HHPQQQQQQQQPQQQQPPPPPRAGALQPPASGTRVVPNPHHSGSAPAPSSKDLKFGIDRILSAEFDPKVK

SEQ ID NO: 23601 - protein, 70 aa, Synthetic construct
QPRTRRTKFTLLQVEELESVFRHTQYPDVPVTEDKVRVWFKNKRARCRRHQRELMLANELRADPDDCVYI

SEQ ID NO: 23602 - protein, 70 aa, Synthetic construct
QPRTRRTKFTLLQVEELESVFRHTQYPDVPTRRELAENLGVTEDKVRVWFKNKRARCRRHRADPDDCVYI

SEQ ID NO: 23603 - protein, 70 aa, Synthetic construct
QPRTRRTKFTLLQVEELESVFRHTQYPDVPTRRELAENLGVTEDKVRVWFKNKRARCRRHQRELMDCVYI

SEQ ID NO: 23604 - protein, 70 aa, Synthetic construct
QPRTRRTKFTLLQVEELESVFRHTQYPDVPTRRELAENLGVTEDKVRVWFKNKRARCRRHQRELMLANEL

SEQ ID NO: 23605 - protein, 70 aa, Synthetic construct
RKKRCPYTKYQIRELEREFFFSVYINKEKRLQLSRMLNLTDRQVKIWFQNRRMKEKKINRDRLQYYSANP

SEQ ID NO: 23606 - protein, 70 aa, Synthetic construct
KAGGSSGQRTRKKRCEREFFFSVYINKEKRLQLSRMLNLTDRQVKIWFQNRRMKEKKINRDRLQYYSANP

SEQ ID NO: 23607 - protein, 70 aa, Synthetic construct
KAGGSSGQRTRKKRCPYTKYQIRELEREFFFSVYINKEKRLQLSRMLNLTDRQVKIWFQNRRMKEYSANP

SEQ ID NO: 23608 - protein, 70 aa, Synthetic construct
PPPPQQLGSAASAPRTSTSSFLIKDILGDSKPLAACAPYSTSVSSPHHTPKQESNAVHESFRPKLEQEDS

SEQ ID NO: 23609 - protein, 70 aa, Synthetic construct
QQPLPQLGSAASAPRTSTSSFLIKDILGDSKPLAACAPYSTSVSSPHHTPKQESNAVHESFRPKLEQEDS

SEQ ID NO: 23610 - protein, 70 aa, Synthetic construct
QQPLPPQQPPASAPRTSTSSFLIKDILGDSKPLAACAPYSTSVSSPHHTPKQESNAVHESFRPKLEQEDS

SEQ ID NO: 23611 - protein, 70 aa, Synthetic construct
QQPLPPQQPPPPPPQTSTSSFLIKDILGDSKPLAACAPYSTSVSSPHHTPKQESNAVHESFRPKLEQEDS

SEQ ID NO: 23612 - protein, 70 aa, Synthetic construct
QQPLPPQQPPPPPPQQLGSAASAPRTSTSSFLIKDILGDSTSVSSPHHTPKQESNAVHESFRPKLEQEDS

SEQ ID NO: 23613 - protein, 70 aa, Synthetic construct
QQPLPPQQPPPPPPQQLGSAASAPRTSTSSFLIKDILGDSKPLAAPHHTPKQESNAVHESFRPKLEQEDS

SEQ ID NO: 23614 - protein, 70 aa, Synthetic construct
QQPLPPQQPPPPPPQQLGSAASAPRTSTSSFLIKDILGDSKPLAACAPYSKQESNAVHESFRPKLEQEDS

SEQ ID NO: 23615 - protein, 70 aa, Synthetic construct
QQPLPPQQPPPPPPQQLGSAASAPRTSTSSFLIKDILGDSKPLAACAPYSTSVSSAVHESFRPKLEQEDS

SEQ ID NO: 23616 - protein, 70 aa, Synthetic construct
QQPLPPQQPPPPPPQQLGSAASAPRTSTSSFLIKDILGDSKPLAACAPYSTSVSSPHHTPFRPKLEQEDS

SEQ ID NO: 23617 - protein, 70 aa, Synthetic construct
QQPLPPQQPPPPPPQQLGSAASAPRTSTSSFLIKDILGDSKPLAACAPYSTSVSSPHHTPKQESNEQEDS

SEQ ID NO: 23618 - protein, 70 aa, Synthetic construct
QQPLPPQQPPPPPPQQLGSAASAPRTSTSSFLIKDILGDSKPLAACAPYSTSVSSPHHTPKQESNAVHES

SEQ ID NO: 23619 - protein, 70 aa, Synthetic construct
RPQLQPGSPSLVSEESPSAIDSDKMSDLGGRKPPGNVISVIQHTNSLSRPNSFERSESAELVACTQDKAP

SEQ ID NO: 23620 - protein, 70 aa, Synthetic construct
HGHTEPGSPSLVSEESPSAIDSDKMSDLGGRKPPGNVISVIQHTNSLSRPNSFERSESAELVACTQDKAP

SEQ ID NO: 23621 - protein, 70 aa, Synthetic construct
HGHTERFDPCLVSEESPSAIDSDKMSDLGGRKPPGNVISVIQHTNSLSRPNSFERSESAELVACTQDKAP

SEQ ID NO: 23622 - protein, 70 aa, Synthetic construct
HGHTERFDPCRPQLQSPSAIDSDKMSDLGGRKPPGNVISVIQHTNSLSRPNSFERSESAELVACTQDKAP

SEQ ID NO: 23623 - protein, 70 aa, Synthetic construct
HGHTERFDPCRPQLQPGSPSDSDKMSDLGGRKPPGNVISVIQHTNSLSRPNSFERSESAELVACTQDKAP

SEQ ID NO: 23624 - protein, 70 aa, Synthetic construct
HGHTERFDPCRPQLQPGSPSLVSEESDLGGRKPPGNVISVIQHTNSLSRPNSFERSESAELVACTQDKAP

SEQ ID NO: 23625 - protein, 70 aa, Synthetic construct
HGHTERFDPCRPQLQPGSPSLVSEESPSAIRKPPGNVISVIQHTNSLSRPNSFERSESAELVACTQDKAP

SEQ ID NO: 23626 - protein, 70 aa, Synthetic construct
HGHTERFDPCRPQLQPGSPSLVSEESPSAIDSDKMNVISVIQHTNSLSRPNSFERSESAELVACTQDKAP

SEQ ID NO: 23627 - protein, 70 aa, Synthetic construct
HGHTERFDPCRPQLQPGSPSLVSEESPSAIDSDKMSDLGGRKPPGNVISVIQHTNSESAELVACTQDKAP

SEQ ID NO: 23628 - protein, 70 aa, Synthetic construct
HGHTERFDPCRPQLQPGSPSLVSEESPSAIDSDKMSDLGGRKPPGNVISVIQHTNSLSRPLVACTQDKAP

SEQ ID NO: 23629 - protein, 70 aa, Synthetic construct
HGHTERFDPCRPQLQPGSPSLVSEESPSAIDSDKMSDLGGRKPPGNVISVIQHTNSLSRPNSFERQDKAP

SEQ ID NO: 23630 - protein, 70 aa, Synthetic construct
HGHTERFDPCRPQLQPGSPSLVSEESPSAIDSDKMSDLGGRKPPGNVISVIQHTNSLSRPNSFERSESAE

SEQ ID NO: 23631 - protein, 70 aa, Synthetic construct
QSYHTQPRLVRQHNIQVPEIRVTEEPDKPEKEKEAQSKEPEKPVEEFQWPQRSETLSQLPAEKLPPKKKR

SEQ ID NO: 23632 - protein, 70 aa, Synthetic construct
KPSPSQQVQQQSYHTQVPEIRVTEEPDKPEKEKEAQSKEPEKPVEEFQWPQRSETLSQLPAEKLPPKKKR

SEQ ID NO: 23633 - protein, 70 aa, Synthetic construct
KPSPSQQVQQQSYHTQPRLVRVTEEPDKPEKEKEAQSKEPEKPVEEFQWPQRSETLSQLPAEKLPPKKKR

SEQ ID NO: 23634 - protein, 70 aa, Synthetic construct
KPSPSQQVQQQSYHTQPRLVRQHNIPDKPEKEKEAQSKEPEKPVEEFQWPQRSETLSQLPAEKLPPKKKR

SEQ ID NO: 23635 - protein, 70 aa, Synthetic construct
KPSPSQQVQQQSYHTQPRLVRQHNIQVPEIKEKEAQSKEPEKPVEEFQWPQRSETLSQLPAEKLPPKKKR

SEQ ID NO: 23636 - protein, 70 aa, Synthetic construct
KPSPSQQVQQQSYHTQPRLVRQHNIQVPEIRVTEEQSKEPEKPVEEFQWPQRSETLSQLPAEKLPPKKKR

SEQ ID NO: 23637 - protein, 70 aa, Synthetic construct
KPSPSQQVQQQSYHTQPRLVRQHNIQVPEIRVTEEPDKPEEKPVEEFQWPQRSETLSQLPAEKLPPKKKR

SEQ ID NO: 23638 - protein, 70 aa, Synthetic construct
KPSPSQQVQQQSYHTQPRLVRQHNIQVPEIRVTEEPDKPEKEKEAEFQWPQRSETLSQLPAEKLPPKKKR

SEQ ID NO: 23639 - protein, 70 aa, Synthetic construct
ARERDRTNSVNTAFTALRTLIPTEPADRKLSKIETLRLASSYISHLGNVLLAGEACGDGQPCHSGPAFFH

SEQ ID NO: 23640 - protein, 70 aa, Synthetic construct
REPRQRTNSVNTAFTALRTLIPTEPADRKLSKIETLRLASSYISHLGNVLLAGEACGDGQPCHSGPAFFH

SEQ ID NO: 23641 - protein, 70 aa, Synthetic construct
REPRQRHTANARERDRTNSVNTAFTALRTLIPTEPADRKLSKIETLRLASSYISHLGNVLLAGEAPAFFH

SEQ ID NO: 23642 - protein, 70 aa, Synthetic construct
REPRQRHTANARERDRTNSVNTAFTALRTLIPTEPADRKLSKIETLRLASSYISHLGNVLLAGEACGDGQ

SEQ ID NO: 23643 - protein, 70 aa, Synthetic construct
RGRKKRIPYSKGQLRELEREYAANKFITKDKRRKISAATSLSERQITIWFQNRRVKEKKVLAKVKNSATP

SEQ ID NO: 23644 - protein, 70 aa, Synthetic construct
QHPPDACAFRRGRKKRIPYSKGQLRELEREYAANKFITKDKRRKISAATSLSERQITIWFQNRRVKEKKV

SEQ ID NO: 23645 - protein, 70 aa, Synthetic construct
DISSPCEQIMVRTRSATEPECLGPCEPGTSVNLEGIVWQETEDGMLVVNVTWRNKTYVGTLLDCTRHDWA

SEQ ID NO: 23646 - protein, 70 aa, Synthetic construct
DISSPCEQIMVRTRSVGVNTCDVALATEPEVNLEGIVWQETEDGMLVVNVTWRNKTYVGTLLDCTRHDWA

SEQ ID NO: 23647 - protein, 70 aa, Synthetic construct
DISSPCEQIMVRTRSVGVNTCDVALATEPECLGPCIVWQETEDGMLVVNVTWRNKTYVGTLLDCTRHDWA

SEQ ID NO: 23648 - protein, 70 aa, Synthetic construct
DISSPCEQIMVRTRSVGVNTCDVALATEPECLGPCEPGTSTEDGMLVVNVTWRNKTYVGTLLDCTRHDWA

SEQ ID NO: 23649 - protein, 70 aa, Synthetic construct
DISSPCEQIMVRTRSVGVNTCDVALATEPECLGPCEPGTSVNLEGLVVNVTWRNKTYVGTLLDCTRHDWA

SEQ ID NO: 23650 - protein, 70 aa, Synthetic construct
DISSPCEQIMVRTRSVGVNTCDVALATEPECLGPCEPGTSVNLEGIVWQETEDGMLVVNVLLDCTRHDWA

SEQ ID NO: 23651 - protein, 70 aa, Synthetic construct
DISSPCEQIMVRTRSVGVNTCDVALATEPECLGPCEPGTSVNLEGIVWQETEDGMLVVNVTWRNKRHDWA

SEQ ID NO: 23652 - protein, 70 aa, Synthetic construct
DISSPCEQIMVRTRSVGVNTCDVALATEPECLGPCEPGTSVNLEGIVWQETEDGMLVVNVTWRNKTYVGT

SEQ ID NO: 23653 - protein, 70 aa, Synthetic construct
TEDGMLVVNVTWRNKTYVGTLLDCTDSPTSDLEMRNGRGRGKRMRPNSNTPVNETATASDSKGTSNSSKT

SEQ ID NO: 23654 - protein, 70 aa, Synthetic construct
TEDGMLVVNVTWRNKTYVGTLLDCTRHDWADLEMRNGRGRGKRMRPNSNTPVNETATASDSKGTSNSSKT

SEQ ID NO: 23655 - protein, 70 aa, Synthetic construct
TEDGMLVVNVTWRNKTYVGTLLDCTRHDWAPPRFCNGRGRGKRMRPNSNTPVNETATASDSKGTSNSSKT

SEQ ID NO: 23656 - protein, 70 aa, Synthetic construct
TEDGMLVVNVTWRNKTYVGTLLDCTRHDWAPPRFCDSPTSGKRMRPNSNTPVNETATASDSKGTSNSSKT

SEQ ID NO: 23657 - protein, 70 aa, Synthetic construct
TEDGMLVVNVTWRNKTYVGTLLDCTRHDWAPPRFCDSPTSDLEMRPNSNTPVNETATASDSKGTSNSSKT

SEQ ID NO: 23658 - protein, 70 aa, Synthetic construct
TEDGMLVVNVTWRNKTYVGTLLDCTRHDWAPPRFCDSPTSDLEMRNGRGRPVNETATASDSKGTSNSSKT

SEQ ID NO: 23659 - protein, 70 aa, Synthetic construct
TEDGMLVVNVTWRNKTYVGTLLDCTRHDWAPPRFCDSPTSDLEMRNGRGRGKRMRATASDSKGTSNSSKT

SEQ ID NO: 23660 - protein, 70 aa, Synthetic construct
TEDGMLVVNVTWRNKTYVGTLLDCTRHDWAPPRFCDSPTSDLEMRNGRGRGKRMRPNSNTSKGTSNSSKT

SEQ ID NO: 23661 - protein, 70 aa, Synthetic construct
TEDGMLVVNVTWRNKTYVGTLLDCTRHDWAPPRFCDSPTSDLEMRNGRGRGKRMRPNSNTPVNETNSSKT

SEQ ID NO: 23662 - protein, 70 aa, Synthetic construct
TEDGMLVVNVTWRNKTYVGTLLDCTRHDWAPPRFCDSPTSDLEMRNGRGRGKRMRPNSNTPVNETATASD

SEQ ID NO: 23663 - protein, 70 aa, Synthetic construct
GDFDDGFLRRKQRRNRTTFTLQQLEALEAVFAQTHYPDVFTREELAMKINLTEARVQVWFQNRRAKWRKT

SEQ ID NO: 23664 - protein, 70 aa, Synthetic construct
GTATFGFLRRKQRRNRTTFTLQQLEALEAVFAQTHYPDVFTREELAMKINLTEARVQVWFQNRRAKWRKT

SEQ ID NO: 23665 - protein, 70 aa, Synthetic construct
GTATFGNHSSKQRRNRTTFTLQQLEALEAVFAQTHYPDVFTREELAMKINLTEARVQVWFQNRRAKWRKT

SEQ ID NO: 23666 - protein, 70 aa, Synthetic construct
SAISNGVTGQLNIVQYIKPEPDGAFSSSCLGGNSKINSDSSFSVPIKQESTKHSCSGTSFKGNPTVNPFP

SEQ ID NO: 23667 - protein, 70 aa, Synthetic construct
VPFPKGVTGQLNIVQYIKPEPDGAFSSSCLGGNSKINSDSSFSVPIKQESTKHSCSGTSFKGNPTVNPFP

SEQ ID NO: 23668 - protein, 70 aa, Synthetic construct
VPFPKTEEVELNIVQYIKPEPDGAFSSSCLGGNSKINSDSSFSVPIKQESTKHSCSGTSFKGNPTVNPFP

SEQ ID NO: 23669 - protein, 70 aa, Synthetic construct
VPFPKTEEVESAISNYIKPEPDGAFSSSCLGGNSKINSDSSFSVPIKQESTKHSCSGTSFKGNPTVNPFP

SEQ ID NO: 23670 - protein, 70 aa, Synthetic construct
VPFPKTEEVESAISNGVTGQPDGAFSSSCLGGNSKINSDSSFSVPIKQESTKHSCSGTSFKGNPTVNPFP

SEQ ID NO: 23671 - protein, 70 aa, Synthetic construct
VPFPKTEEVESAISNGVTGQLNIVQSSSCLGGNSKINSDSSFSVPIKQESTKHSCSGTSFKGNPTVNPFP

SEQ ID NO: 23672 - protein, 70 aa, Synthetic construct
VPFPKTEEVESAISNGVTGQLNIVQYIKPEGGNSKINSDSSFSVPIKQESTKHSCSGTSFKGNPTVNPFP

SEQ ID NO: 23673 - protein, 70 aa, Synthetic construct
VPFPKTEEVESAISNGVTGQLNIVQYIKPEPDGAFINSDSSFSVPIKQESTKHSCSGTSFKGNPTVNPFP

SEQ ID NO: 23674 - protein, 70 aa, Synthetic construct
VPFPKTEEVESAISNGVTGQLNIVQYIKPEPDGAFSSSCLSFSVPIKQESTKHSCSGTSFKGNPTVNPFP

SEQ ID NO: 23675 - protein, 70 aa, Synthetic construct
VPFPKTEEVESAISNGVTGQLNIVQYIKPEPDGAFSSSCLGGNSKIKQESTKHSCSGTSFKGNPTVNPFP

SEQ ID NO: 23676 - protein, 70 aa, Synthetic construct
VPFPKTEEVESAISNGVTGQLNIVQYIKPEPDGAFSSSCLGGNSKINSDSTKHSCSGTSFKGNPTVNPFP

SEQ ID NO: 23677 - protein, 70 aa, Synthetic construct
VPFPKTEEVESAISNGVTGQLNIVQYIKPEPDGAFSSSCLGGNSKINSDSSFSVPSGTSFKGNPTVNPFP

SEQ ID NO: 23678 - protein, 70 aa, Synthetic construct
VPFPKTEEVESAISNGVTGQLNIVQYIKPEPDGAFSSSCLGGNSKINSDSSFSVPIKQESKGNPTVNPFP

SEQ ID NO: 23679 - protein, 70 aa, Synthetic construct
VPFPKTEEVESAISNGVTGQLNIVQYIKPEPDGAFSSSCLGGNSKINSDSSFSVPIKQESTKHSCVNPFP

SEQ ID NO: 23680 - protein, 70 aa, Synthetic construct
VPFPKTEEVESAISNGVTGQLNIVQYIKPEPDGAFSSSCLGGNSKINSDSSFSVPIKQESTKHSCSGTSF

SEQ ID NO: 23681 - protein, 70 aa, Synthetic construct
ELRKMVTKCPNNSGQSWQRFYQLTKLLDSMHDLVSDLLEFCFYTFRESHALKVEFPAMLVEIISDQLPKV

SEQ ID NO: 23682 - protein, 70 aa, Synthetic construct
FEEMRVTKCPNNSGQSWQRFYQLTKLLDSMHDLVSDLLEFCFYTFRESHALKVEFPAMLVEIISDQLPKV

SEQ ID NO: 23683 - protein, 70 aa, Synthetic construct
FEEMRTNYIKNNSGQSWQRFYQLTKLLDSMHDLVSDLLEFCFYTFRESHALKVEFPAMLVEIISDQLPKV

SEQ ID NO: 23684 - protein, 70 aa, Synthetic construct
FEEMRTNYIKELRKMSWQRFYQLTKLLDSMHDLVSDLLEFCFYTFRESHALKVEFPAMLVEIISDQLPKV

SEQ ID NO: 23685 - protein, 70 aa, Synthetic construct
FEEMRTNYIKELRKMVTKCPYQLTKLLDSMHDLVSDLLEFCFYTFRESHALKVEFPAMLVEIISDQLPKV

SEQ ID NO: 23686 - protein, 70 aa, Synthetic construct
FEEMRTNYIKELRKMVTKCPNNSGQLLDSMHDLVSDLLEFCFYTFRESHALKVEFPAMLVEIISDQLPKV

SEQ ID NO: 23687 - protein, 70 aa, Synthetic construct
FEEMRTNYIKELRKMVTKCPNNSGQSWQRFHDLVSDLLEFCFYTFRESHALKVEFPAMLVEIISDQLPKV

SEQ ID NO: 23688 - protein, 70 aa, Synthetic construct
FEEMRTNYIKELRKMVTKCPNNSGQSWQRFYQLTKLLDSMCFYTFRESHALKVEFPAMLVEIISDQLPKV

SEQ ID NO: 23689 - protein, 70 aa, Synthetic construct
FEEMRTNYIKELRKMVTKCPNNSGQSWQRFYQLTKLLDSMHDLVSRESHALKVEFPAMLVEIISDQLPKV

SEQ ID NO: 23690 - protein, 70 aa, Synthetic construct
FEEMRTNYIKELRKMVTKCPNNSGQSWQRFYQLTKLLDSMHDLVSDLLEFLKVEFPAMLVEIISDQLPKV

SEQ ID NO: 23691 - protein, 70 aa, Synthetic construct
FEEMRTNYIKELRKMVTKCPNNSGQSWQRFYQLTKLLDSMHDLVSDLLEFCFYTFPAMLVEIISDQLPKV

SEQ ID NO: 23692 - protein, 70 aa, Synthetic construct
FEEMRTNYIKELRKMVTKCPNNSGQSWQRFYQLTKLLDSMHDLVSDLLEFCFYTFRESHAEIISDQLPKV

SEQ ID NO: 23693 - protein, 70 aa, Synthetic construct
FEEMRTNYIKELRKMVTKCPNNSGQSWQRFYQLTKLLDSMHDLVSDLLEFCFYTFRESHALKVEFQLPKV

SEQ ID NO: 23694 - protein, 70 aa, Synthetic construct
FEEMRTNYIKELRKMVTKCPNNSGQSWQRFYQLTKLLDSMHDLVSDLLEFCFYTFRESHALKVEFPAMLV

SEQ ID NO: 23695 - protein, 70 aa, Synthetic construct
PGRFESPFSVEAILARPDPCAPAASQPSGSACVHPAFWTAASLCATGGLPWACPTSWLPAYLSVGFYPVP

SEQ ID NO: 23696 - protein, 70 aa, Synthetic construct
SPTGPSPFSVEAILARPDPCAPAASQPSGSACVHPAFWTAASLCATGGLPWACPTSWLPAYLSVGFYPVP

SEQ ID NO: 23697 - protein, 70 aa, Synthetic construct
SPTGPNTPRAPGRFESPFSVEAILAQPSGSACVHPAFWTAASLCATGGLPWACPTSWLPAYLSVGFYPVP

SEQ ID NO: 23698 - protein, 70 aa, Synthetic construct
SPTGPNTPRAPGRFESPFSVEAILARPDPCACVHPAFWTAASLCATGGLPWACPTSWLPAYLSVGFYPVP

SEQ ID NO: 23699 - protein, 70 aa, Synthetic construct
SPTGPNTPRAPGRFESPFSVEAILARPDPCAPAASAFWTAASLCATGGLPWACPTSWLPAYLSVGFYPVP

SEQ ID NO: 23700 - protein, 70 aa, Synthetic construct
SPTGPNTPRAPGRFESPFSVEAILARPDPCAPAASQPSGSASLCATGGLPWACPTSWLPAYLSVGFYPVP

SEQ ID NO: 23701 - protein, 70 aa, Synthetic construct
SPTGPNTPRAPGRFESPFSVEAILARPDPCAPAASQPSGSACVHPTGGLPWACPTSWLPAYLSVGFYPVP

SEQ ID NO: 23702 - protein, 70 aa, Synthetic construct
SPTGPNTPRAPGRFESPFSVEAILARPDPCAPAASQPSGSACVHPAFWTAWACPTSWLPAYLSVGFYPVP

SEQ ID NO: 23703 - protein, 70 aa, Synthetic construct
SPTGPNTPRAPGRFESPFSVEAILARPDPCAPAASQPSGSACVHPAFWTAASLCASWLPAYLSVGFYPVP

SEQ ID NO: 23704 - protein, 70 aa, Synthetic construct
SPTGPNTPRAPGRFESPFSVEAILARPDPCAPAASQPSGSACVHPAFWTAASLCATGGLPYLSVGFYPVP

SEQ ID NO: 23705 - protein, 70 aa, Synthetic construct
SPTGPNTPRAPGRFESPFSVEAILARPDPCAPAASQPSGSACVHPAFWTAASLCATGGLPWACPTFYPVP

SEQ ID NO: 23706 - protein, 70 aa, Synthetic construct
SPTGPNTPRAPGRFESPFSVEAILARPDPCAPAASQPSGSACVHPAFWTAASLCATGGLPWACPTSWLPA

SEQ ID NO: 23707 - protein, 70 aa, Synthetic construct
VMHNYESSGINITKGTELQIAVVSPLVLSEVKTLSVKGITPAVLPETVYPVIKEGSVCSLQNQLAENAKA

SEQ ID NO: 23708 - protein, 70 aa, Synthetic construct
NPSQQESSGINITKGTELQIAVVSPLVLSEVKTLSVKGITPAVLPETVYPVIKEGSVCSLQNQLAENAKA

SEQ ID NO: 23709 - protein, 70 aa, Synthetic construct
NPSQQTALSMNITKGTELQIAVVSPLVLSEVKTLSVKGITPAVLPETVYPVIKEGSVCSLQNQLAENAKA

SEQ ID NO: 23710 - protein, 70 aa, Synthetic construct
NPSQQTALSMVMHNYTELQIAVVSPLVLSEVKTLSVKGITPAVLPETVYPVIKEGSVCSLQNQLAENAKA

SEQ ID NO: 23711 - protein, 70 aa, Synthetic construct
NPSQQTALSMVMHNYESSGIAVVSPLVLSEVKTLSVKGITPAVLPETVYPVIKEGSVCSLQNQLAENAKA

SEQ ID NO: 23712 - protein, 70 aa, Synthetic construct
NPSQQTALSMVMHNYESSGINITKGLVLSEVKTLSVKGITPAVLPETVYPVIKEGSVCSLQNQLAENAKA

SEQ ID NO: 23713 - protein, 70 aa, Synthetic construct
NPSQQTALSMVMHNYESSGINITKGTELQIVKTLSVKGITPAVLPETVYPVIKEGSVCSLQNQLAENAKA

SEQ ID NO: 23714 - protein, 70 aa, Synthetic construct
NPSQQTALSMVMHNYESSGINITKGTELQIAVVSPVKGITPAVLPETVYPVIKEGSVCSLQNQLAENAKA

SEQ ID NO: 23715 - protein, 70 aa, Synthetic construct
NPSQQTALSMVMHNYESSGINITKGTELQIAVVSPLVLSEPAVLPETVYPVIKEGSVCSLQNQLAENAKA

SEQ ID NO: 23716 - protein, 70 aa, Synthetic construct
NPSQQTALSMVMHNYESSGINITKGTELQIAVVSPLVLSEVKTLSETVYPVIKEGSVCSLQNQLAENAKA

SEQ ID NO: 23717 - protein, 70 aa, Synthetic construct
NPSQQTALSMVMHNYESSGINITKGTELQIAVVSPLVLSEVKTLSVKGITPAVLPETVYPVIKEGSVCSL

SEQ ID NO: 23718 - protein, 70 aa, Synthetic construct
PAVLPETVYPVIKEGSVCSLTAALKVDVSGPVASTATSTKIFPLTQKEKQNESTNGNSEVTPNVNQGKHN

SEQ ID NO: 23719 - protein, 70 aa, Synthetic construct
PAVLPETVYPVIKEGSVCSLQNQLAVDVSGPVASTATSTKIFPLTQKEKQNESTNGNSEVTPNVNQGKHN

SEQ ID NO: 23720 - protein, 70 aa, Synthetic construct
PAVLPETVYPVIKEGSVCSLQNQLAENAKAPVASTATSTKIFPLTQKEKQNESTNGNSEVTPNVNQGKHN

SEQ ID NO: 23721 - protein, 70 aa, Synthetic construct
PAVLPETVYPVIKEGSVCSLQNQLAENAKATAALKATSTKIFPLTQKEKQNESTNGNSEVTPNVNQGKHN

SEQ ID NO: 23722 - protein, 70 aa, Synthetic construct
PAVLPETVYPVIKEGSVCSLQNQLAENAKATAALKVDVSGIFPLTQKEKQNESTNGNSEVTPNVNQGKHN

SEQ ID NO: 23723 - protein, 70 aa, Synthetic construct
PAVLPETVYPVIKEGSVCSLQNQLAENAKATAALKVDVSGPVASTQKEKQNESTNGNSEVTPNVNQGKHN

SEQ ID NO: 23724 - protein, 70 aa, Synthetic construct
PAVLPETVYPVIKEGSVCSLQNQLAENAKATAALKVDVSGPVASTATSTKNESTNGNSEVTPNVNQGKHN

SEQ ID NO: 23725 - protein, 70 aa, Synthetic construct
PAVLPETVYPVIKEGSVCSLQNQLAENAKATAALKVDVSGPVASTATSTKIFPLTGNSEVTPNVNQGKHN

SEQ ID NO: 23726 - protein, 70 aa, Synthetic construct
PAVLPETVYPVIKEGSVCSLQNQLAENAKATAALKVDVSGPVASTATSTKIFPLTQKEKQTPNVNQGKHN

SEQ ID NO: 23727 - protein, 70 aa, Synthetic construct
PAVLPETVYPVIKEGSVCSLQNQLAENAKATAALKVDVSGPVASTATSTKIFPLTQKEKQNESTNQGKHN

SEQ ID NO: 23728 - protein, 70 aa, Synthetic construct
PAVLPETVYPVIKEGSVCSLQNQLAENAKATAALKVDVSGPVASTATSTKIFPLTQKEKQNESTNGNSEV

SEQ ID NO: 23729 - protein, 70 aa, Synthetic construct
TPNVNQGKHNKLESAIHSPMNDQQISQESRNSTVVSSDTLQIDNICSLVEGDTSYNSQIAKIFSSLPLKM

SEQ ID NO: 23730 - protein, 70 aa, Synthetic construct
NESTNQGKHNKLESAIHSPMNDQQISQESRNSTVVSSDTLQIDNICSLVEGDTSYNSQIAKIFSSLPLKM

SEQ ID NO: 23731 - protein, 70 aa, Synthetic construct
NESTNGNSEVKLESAIHSPMNDQQISQESRNSTVVSSDTLQIDNICSLVEGDTSYNSQIAKIFSSLPLKM

SEQ ID NO: 23732 - protein, 70 aa, Synthetic construct
NESTNGNSEVTPNVNIHSPMNDQQISQESRNSTVVSSDTLQIDNICSLVEGDTSYNSQIAKIFSSLPLKM

SEQ ID NO: 23733 - protein, 70 aa, Synthetic construct
NESTNGNSEVTPNVNQGKHNNDQQISQESRNSTVVSSDTLQIDNICSLVEGDTSYNSQIAKIFSSLPLKM

SEQ ID NO: 23734 - protein, 70 aa, Synthetic construct
NESTNGNSEVTPNVNQGKHNKLESASQESRNSTVVSSDTLQIDNICSLVEGDTSYNSQIAKIFSSLPLKM

SEQ ID NO: 23735 - protein, 70 aa, Synthetic construct
NESTNGNSEVTPNVNQGKHNKLESAIHSPMNSTVVSSDTLQIDNICSLVEGDTSYNSQIAKIFSSLPLKM

SEQ ID NO: 23736 - protein, 70 aa, Synthetic construct
NESTNGNSEVTPNVNQGKHNKLESAIHSPMNDQQISSDTLQIDNICSLVEGDTSYNSQIAKIFSSLPLKM

SEQ ID NO: 23737 - protein, 70 aa, Synthetic construct
IHSDKAPVLYLHDQLSELLKEFPYGIEAVNTREGSVGQQTTYQTSEDQTADKTSSDSKDPADQIQITILS

SEQ ID NO: 23738 - protein, 70 aa, Synthetic construct
YTPQDAPVLYLHDQLSELLKEFPYGIEAVNTREGSVGQQTTYQTSEDQTADKTSSDSKDPADQIQITILS

SEQ ID NO: 23739 - protein, 70 aa, Synthetic construct
YTPQDPARNELHDQLSELLKEFPYGIEAVNTREGSVGQQTTYQTSEDQTADKTSSDSKDPADQIQITILS

SEQ ID NO: 23740 - protein, 70 aa, Synthetic construct
YTPQDPARNEIHSDKAPVLYLHDQLSELLKEFPYGVGQQTTYQTSEDQTADKTSSDSKDPADQIQITILS

SEQ ID NO: 23741 - protein, 70 aa, Synthetic construct
YTPQDPARNEIHSDKAPVLYLHDQLSELLKEFPYGIEAVNTYQTSEDQTADKTSSDSKDPADQIQITILS

SEQ ID NO: 23742 - protein, 70 aa, Synthetic construct
YTPQDPARNEIHSDKAPVLYLHDQLSELLKEFPYGIEAVNTREGSEDQTADKTSSDSKDPADQIQITILS

SEQ ID NO: 23743 - protein, 70 aa, Synthetic construct
YTPQDPARNEIHSDKAPVLYLHDQLSELLKEFPYGIEAVNTREGSVGQQTDKTSSDSKDPADQIQITILS

SEQ ID NO: 23744 - protein, 70 aa, Synthetic construct
YTPQDPARNEIHSDKAPVLYLHDQLSELLKEFPYGIEAVNTREGSVGQQTTYQTSDSKDPADQIQITILS

SEQ ID NO: 23745 - protein, 70 aa, Synthetic construct
YTPQDPARNEIHSDKAPVLYLHDQLSELLKEFPYGIEAVNTREGSVGQQTTYQTSEDQTAADQIQITILS

SEQ ID NO: 23746 - protein, 70 aa, Synthetic construct
YTPQDPARNEIHSDKAPVLYLHDQLSELLKEFPYGIEAVNTREGSVGQQTTYQTSEDQTADKTSSITILS

SEQ ID NO: 23747 - protein, 70 aa, Synthetic construct
YTPQDPARNEIHSDKAPVLYLHDQLSELLKEFPYGIEAVNTREGSVGQQTTYQTSEDQTADKTSSDSKDP

SEQ ID NO: 23748 - protein, 70 aa, Synthetic construct
SQFPPAAAAASTSGFKHPFAIENIIGRDYKGVLQAGGLPLASVMHHLGYPVPGQLGNVVSSVWPHVGVMD

SEQ ID NO: 23749 - protein, 70 aa, Synthetic construct
SQFPPYGLGSAAAAAAAAAASTSGFKHPFAIENIIGRDYKASVMHHLGYPVPGQLGNVVSSVWPHVGVMD

SEQ ID NO: 23750 - protein, 70 aa, Synthetic construct
IKQEADTPGLPKIYAREGPDPYSVRVEDGAGTAGGTVPATIGPAQPFFKEEKEGGVEEAGGPPASLCKLE

SEQ ID NO: 23751 - protein, 70 aa, Synthetic construct
TPAAPPYYCDPKIYAREGPDPYSVRVEDGAGTAGGTVPATIGPAQPFFKEEKEGGVEEAGGPPASLCKLE

SEQ ID NO: 23752 - protein, 70 aa, Synthetic construct
TPAAPPYYCDIKQEAREGPDPYSVRVEDGAGTAGGTVPATIGPAQPFFKEEKEGGVEEAGGPPASLCKLE

SEQ ID NO: 23753 - protein, 70 aa, Synthetic construct
TPAAPPYYCDIKQEADTPGLPYSVRVEDGAGTAGGTVPATIGPAQPFFKEEKEGGVEEAGGPPASLCKLE

SEQ ID NO: 23754 - protein, 70 aa, Synthetic construct
TPAAPPYYCDIKQEADTPGLPKIYAVEDGAGTAGGTVPATIGPAQPFFKEEKEGGVEEAGGPPASLCKLE

SEQ ID NO: 23755 - protein, 70 aa, Synthetic construct
TPAAPPYYCDIKQEADTPGLPKIYAREGPDGTAGGTVPATIGPAQPFFKEEKEGGVEEAGGPPASLCKLE

SEQ ID NO: 23756 - protein, 70 aa, Synthetic construct
TPAAPPYYCDIKQEADTPGLPKIYAREGPDPYSVRTVPATIGPAQPFFKEEKEGGVEEAGGPPASLCKLE

SEQ ID NO: 23757 - protein, 70 aa, Synthetic construct
TPAAPPYYCDIKQEADTPGLPKIYAREGPDPYSVRVEDGAIGPAQPFFKEEKEGGVEEAGGPPASLCKLE

SEQ ID NO: 23758 - protein, 70 aa, Synthetic construct
TPAAPPYYCDIKQEADTPGLPKIYAREGPDPYSVRVEDGAGTAGGPFFKEEKEGGVEEAGGPPASLCKLE

SEQ ID NO: 23759 - protein, 70 aa, Synthetic construct
TPAAPPYYCDIKQEADTPGLPKIYAREGPDPYSVRVEDGAGTAGGTVPATEKEGGVEEAGGPPASLCKLE

SEQ ID NO: 23760 - protein, 70 aa, Synthetic construct
TPAAPPYYCDIKQEADTPGLPKIYAREGPDPYSVRVEDGAGTAGGTVPATIGPAQVEEAGGPPASLCKLE

SEQ ID NO: 23761 - protein, 70 aa, Synthetic construct
TPAAPPYYCDIKQEADTPGLPKIYAREGPDPYSVRVEDGAGTAGGTVPATIGPAQPFFKEGPPASLCKLE

SEQ ID NO: 23762 - protein, 70 aa, Synthetic construct
TPAAPPYYCDIKQEADTPGLPKIYAREGPDPYSVRVEDGAGTAGGTVPATIGPAQPFFKEEKEGGLCKLE

SEQ ID NO: 23763 - protein, 70 aa, Synthetic construct
TPAAPPYYCDIKQEADTPGLPKIYAREGPDPYSVRVEDGAGTAGGTVPATIGPAQPFFKEEKEGGVEEAG

SEQ ID NO: 23764 - protein, 70 aa, Synthetic construct
AVHMVAGEGAQIIMQEAQGEHMDLVESDGEISQIIVTEELVQAMVQESSGGFSEGTTHYILTELPPGVQD

SEQ ID NO: 23765 - protein, 70 aa, Synthetic construct
VTQVVAGEGAQIIMQEAQGEHMDLVESDGEISQIIVTEELVQAMVQESSGGFSEGTTHYILTELPPGVQD

SEQ ID NO: 23766 - protein, 70 aa, Synthetic construct
VTQVVVSEEGQIIMQEAQGEHMDLVESDGEISQIIVTEELVQAMVQESSGGFSEGTTHYILTELPPGVQD

SEQ ID NO: 23767 - protein, 70 aa, Synthetic construct
VTQVVVSEEGAVHMVEAQGEHMDLVESDGEISQIIVTEELVQAMVQESSGGFSEGTTHYILTELPPGVQD

SEQ ID NO: 23768 - protein, 70 aa, Synthetic construct
VTQVVVSEEGAVHMVAGEGAHMDLVESDGEISQIIVTEELVQAMVQESSGGFSEGTTHYILTELPPGVQD

SEQ ID NO: 23769 - protein, 70 aa, Synthetic construct
VTQVVVSEEGAVHMVAGEGAQIIMQESDGEISQIIVTEELVQAMVQESSGGFSEGTTHYILTELPPGVQD

SEQ ID NO: 23770 - protein, 70 aa, Synthetic construct
VTQVVVSEEGAVHMVAGEGAQIIMQEAQGEISQIIVTEELVQAMVQESSGGFSEGTTHYILTELPPGVQD

SEQ ID NO: 23771 - protein, 70 aa, Synthetic construct
VTQVVVSEEGAVHMVAGEGAQIIMQEAQGEHMDLVESDGEISQIIVTEELVQAMVTTHYILTELPPGVQD

SEQ ID NO: 23772 - protein, 70 aa, Synthetic construct
VTQVVVSEEGAVHMVAGEGAQIIMQEAQGEHMDLVESDGEISQIIVTEELVQAMVQESSGLTELPPGVQD

SEQ ID NO: 23773 - protein, 70 aa, Synthetic construct
VTQVVVSEEGAVHMVAGEGAQIIMQEAQGEHMDLVESDGEISQIIVTEELVQAMVQESSGGFSEGPGVQD

SEQ ID NO: 23774 - protein, 70 aa, Synthetic construct
VTQVVVSEEGAVHMVAGEGAQIIMQEAQGEHMDLVESDGEISQIIVTEELVQAMVQESSGGFSEGTTHYI

SEQ ID NO: 23775 - protein, 70 aa, Synthetic construct
PAVPEASASPKQRRSIIRDRGPMYDDPTLPEGWTRKLKQRKSGRSAGKYDVYLINPQGKAFRSKVELIAY

SEQ ID NO: 23776 - protein, 70 aa, Synthetic construct
AETSEASASPKQRRSIIRDRGPMYDDPTLPEGWTRKLKQRKSGRSAGKYDVYLINPQGKAFRSKVELIAY

SEQ ID NO: 23777 - protein, 70 aa, Synthetic construct
AETSEGSGSAKQRRSIIRDRGPMYDDPTLPEGWTRKLKQRKSGRSAGKYDVYLINPQGKAFRSKVELIAY

SEQ ID NO: 23778 - protein, 70 aa, Synthetic construct
AETSEGSGSAPAVPEIIRDRGPMYDDPTLPEGWTRKLKQRKSGRSAGKYDVYLINPQGKAFRSKVELIAY

SEQ ID NO: 23779 - protein, 70 aa, Synthetic construct
AETSEGSGSAPAVPEASASPGPMYDDPTLPEGWTRKLKQRKSGRSAGKYDVYLINPQGKAFRSKVELIAY

SEQ ID NO: 23780 - protein, 70 aa, Synthetic construct
AETSEGSGSAPAVPEASASPKQRRSDPTLPEGWTRKLKQRKSGRSAGKYDVYLINPQGKAFRSKVELIAY

SEQ ID NO: 23781 - protein, 70 aa, Synthetic construct
AETSEGSGSAPAVPEASASPKQRRSIIRDREGWTRKLKQRKSGRSAGKYDVYLINPQGKAFRSKVELIAY

SEQ ID NO: 23782 - protein, 70 aa, Synthetic construct
AETSEGSGSAPAVPEASASPKQRRSIIRDRGPMYDKLKQRKSGRSAGKYDVYLINPQGKAFRSKVELIAY

SEQ ID NO: 23783 - protein, 70 aa, Synthetic construct
AETSEGSGSAPAVPEASASPKQRRSIIRDRGPMYDDPTLPKSGRSAGKYDVYLINPQGKAFRSKVELIAY

SEQ ID NO: 23784 - protein, 70 aa, Synthetic construct
AETSEGSGSAPAVPEASASPKQRRSIIRDRGPMYDDPTLPEGWTRAGKYDVYLINPQGKAFRSKVELIAY

SEQ ID NO: 23785 - protein, 70 aa, Synthetic construct
STQVMVIKRPGRKRKAEADPQAIPKKRGRKPGSVVAAAAAEAKKKAVKESSIRSVQETVLPIKKRKTRET

SEQ ID NO: 23786 - protein, 70 aa, Synthetic construct
GKAEGVIKRPGRKRKAEADPQAIPKKRGRKPGSVVAAAAAEAKKKAVKESSIRSVQETVLPIKKRKTRET

SEQ ID NO: 23787 - protein, 70 aa, Synthetic construct
GKAEGGGATTSTQVMVIKRPGRKRKKRGRKPGSVVAAAAAEAKKKAVKESSIRSVQETVLPIKKRKTRET

SEQ ID NO: 23788 - protein, 70 aa, Synthetic construct
GKAEGGGATTSTQVMVIKRPGRKRKAEADPPGSVVAAAAAEAKKKAVKESSIRSVQETVLPIKKRKTRET

SEQ ID NO: 23789 - protein, 70 aa, Synthetic construct
GKAEGGGATTSTQVMVIKRPGRKRKAEADPQAIPKAAAAAEAKKKAVKESSIRSVQETVLPIKKRKTRET

SEQ ID NO: 23790 - protein, 70 aa, Synthetic construct
GKAEGGGATTSTQVMVIKRPGRKRKAEADPQAIPKKRGRKEAKKKAVKESSIRSVQETVLPIKKRKTRET

SEQ ID NO: 23791 - protein, 70 aa, Synthetic construct
GKAEGGGATTSTQVMVIKRPGRKRKAEADPQAIPKKRGRKPGSVVAAAAASIRSVQETVLPIKKRKTRET

SEQ ID NO: 23792 - protein, 70 aa, Synthetic construct
GKAEGGGATTSTQVMVIKRPGRKRKAEADPQAIPKKRGRKPGSVVAAAAAEAKKKQETVLPIKKRKTRET

SEQ ID NO: 23793 - protein, 70 aa, Synthetic construct
PGSVVAAAAAEAKKKAVKESSIRSVQETVLPIKKRKTRETVSIEVKEVVKPLLVSTLGEKSGKGLKTCKS

SEQ ID NO: 23794 - protein, 70 aa, Synthetic construct
QAIPKAAAAAEAKKKAVKESSIRSVQETVLPIKKRKTRETVSIEVKEVVKPLLVSTLGEKSGKGLKTCKS

SEQ ID NO: 23795 - protein, 70 aa, Synthetic construct
QAIPKKRGRKPGSVVAAAAASIRSVQETVLPIKKRKTRETVSIEVKEVVKPLLVSTLGEKSGKGLKTCKS

SEQ ID NO: 23796 - protein, 70 aa, Synthetic construct
QAIPKKRGRKPGSVVAAAAAEAKKKQETVLPIKKRKTRETVSIEVKEVVKPLLVSTLGEKSGKGLKTCKS

SEQ ID NO: 23797 - protein, 70 aa, Synthetic construct
QAIPKKRGRKPGSVVAAAAAEAKKKAVKESSIRSVQETVLPIKKRKEVVKPLLVSTLGEKSGKGLKTCKS

SEQ ID NO: 23798 - protein, 70 aa, Synthetic construct
QAIPKKRGRKPGSVVAAAAAEAKKKAVKESSIRSVQETVLPIKKRKTRETPLLVSTLGEKSGKGLKTCKS

SEQ ID NO: 23799 - protein, 70 aa, Synthetic construct
QAIPKKRGRKPGSVVAAAAAEAKKKAVKESSIRSVQETVLPIKKRKTRETVSIEVTLGEKSGKGLKTCKS

SEQ ID NO: 23800 - protein, 70 aa, Synthetic construct
QAIPKKRGRKPGSVVAAAAAEAKKKAVKESSIRSVQETVLPIKKRKTRETVSIEVKEVVKSGKGLKTCKS

SEQ ID NO: 23801 - protein, 70 aa, Synthetic construct
QAIPKKRGRKPGSVVAAAAAEAKKKAVKESSIRSVQETVLPIKKRKTRETVSIEVKEVVKPLLVSKTCKS

SEQ ID NO: 23802 - protein, 70 aa, Synthetic construct
QAIPKKRGRKPGSVVAAAAAEAKKKAVKESSIRSVQETVLPIKKRKTRETVSIEVKEVVKPLLVSTLGEK

SEQ ID NO: 23803 - protein, 70 aa, Synthetic construct
SALSIAKEKNISLQTAIAIEALTQLSSALPQPSHSTPQASCPLPEALSPPAPFRSPQSYLRAPSWPVVPP

SEQ ID NO: 23804 - protein, 70 aa, Synthetic construct
SPQEGLPLSQSALSIAKEKNISLQTAIAIEALTQLSSALPCPLPEALSPPAPFRSPQSYLRAPSWPVVPP

SEQ ID NO: 23805 - protein, 70 aa, Synthetic construct
SPQEGLPLSQSALSIAKEKNISLQTAIAIEALTQLSSALPQPSHSALSPPAPFRSPQSYLRAPSWPVVPP

SEQ ID NO: 23806 - protein, 70 aa, Synthetic construct
SPQEGLPLSQSALSIAKEKNISLQTAIAIEALTQLSSALPQPSHSTPQASAPFRSPQSYLRAPSWPVVPP

SEQ ID NO: 23807 - protein, 70 aa, Synthetic construct
SPQEGLPLSQSALSIAKEKNISLQTAIAIEALTQLSSALPQPSHSTPQASCPLPEPQSYLRAPSWPVVPP

SEQ ID NO: 23808 - protein, 70 aa, Synthetic construct
SPQEGLPLSQSALSIAKEKNISLQTAIAIEALTQLSSALPQPSHSTPQASCPLPEALSPPRAPSWPVVPP

SEQ ID NO: 23809 - protein, 70 aa, Synthetic construct
SPQEGLPLSQSALSIAKEKNISLQTAIAIEALTQLSSALPQPSHSTPQASCPLPEALSPPAPFRSPVVPP

SEQ ID NO: 23810 - protein, 70 aa, Synthetic construct
SPQEGLPLSQSALSIAKEKNISLQTAIAIEALTQLSSALPQPSHSTPQASCPLPEALSPPAPFRSPQSYL

SEQ ID NO: 23811 - protein, 70 aa, Synthetic construct
VLGNCRPSDPYSMNSVYSYHSYYAQPSLTSVNGFHSKYALPSFSYYGFPSSNPVFPSQFLGPGAWGHSGS

SEQ ID NO: 23812 - protein, 70 aa, Synthetic construct
SGNAVRPSDPYSMNSVYSYHSYYAQPSLTSVNGFHSKYALPSFSYYGFPSSNPVFPSQFLGPGAWGHSGS

SEQ ID NO: 23813 - protein, 70 aa, Synthetic construct
SGNAVVESYSYSMNSVYSYHSYYAQPSLTSVNGFHSKYALPSFSYYGFPSSNPVFPSQFLGPGAWGHSGS

SEQ ID NO: 23814 - protein, 70 aa, Synthetic construct
SGNAVVESYSVLGNCVYSYHSYYAQPSLTSVNGFHSKYALPSFSYYGFPSSNPVFPSQFLGPGAWGHSGS

SEQ ID NO: 23815 - protein, 70 aa, Synthetic construct
SGNAVVESYSVLGNCRPSDPYSMNSVYSYHVNGFHSKYALPSFSYYGFPSSNPVFPSQFLGPGAWGHSGS

SEQ ID NO: 23816 - protein, 70 aa, Synthetic construct
SGNAVVESYSVLGNCRPSDPYSMNSVYSYHSYYAQSKYALPSFSYYGFPSSNPVFPSQFLGPGAWGHSGS

SEQ ID NO: 23817 - protein, 70 aa, Synthetic construct
SGNAVVESYSVLGNCRPSDPYSMNSVYSYHSYYAQPSLTSPSFSYYGFPSSNPVFPSQFLGPGAWGHSGS

SEQ ID NO: 23818 - protein, 70 aa, Synthetic construct
SGNAVVESYSVLGNCRPSDPYSMNSVYSYHSYYAQPSLTSVNGFHYGFPSSNPVFPSQFLGPGAWGHSGS

SEQ ID NO: 23819 - protein, 70 aa, Synthetic construct
SGNAVVESYSVLGNCRPSDPYSMNSVYSYHSYYAQPSLTSVNGFHSKYALPSFSYPSQFLGPGAWGHSGS

SEQ ID NO: 23820 - protein, 70 aa, Synthetic construct
SGNAVVESYSVLGNCRPSDPYSMNSVYSYHSYYAQPSLTSVNGFHSKYALPSFSYYGFPSGPGAWGHSGS

SEQ ID NO: 23821 - protein, 70 aa, Synthetic construct
SGNAVVESYSVLGNCRPSDPYSMNSVYSYHSYYAQPSLTSVNGFHSKYALPSFSYYGFPSSNPVFGHSGS

SEQ ID NO: 23822 - protein, 70 aa, Synthetic construct
SGNAVVESYSVLGNCRPSDPYSMNSVYSYHSYYAQPSLTSVNGFHSKYALPSFSYYGFPSSNPVFPSQFL

SEQ ID NO: 23823 - protein, 70 aa, Synthetic construct
PPGSAASKRARTAYTSAQLVELEKEFHFNRYLCRPRRVEMANLLNLSERQIKIWFQNRRMKYKKDQKAKG

SEQ ID NO: 23824 - protein, 70 aa, Synthetic construct
KDDNVDSEDSSCLPEDLSLSKQLKIQVKEEPVEEAEEEAPEASTAPKEAGPSKEASLWPCEKCGKMFTVH

SEQ ID NO: 23825 - protein, 70 aa, Synthetic construct
KDDNVFSDSSSCLPEDLSLSKQLKIQVKEEPVEEAEEEAPEASTAPKEAGPSKEASLWPCEKCGKMFTVH

SEQ ID NO: 23826 - protein, 70 aa, Synthetic construct
KDDNVFSDSSEQVNFDLSLSKQLKIQVKEEPVEEAEEEAPEASTAPKEAGPSKEASLWPCEKCGKMFTVH

SEQ ID NO: 23827 - protein, 70 aa, Synthetic construct
KDDNVFSDSSEQVNFDSEDSKQLKIQVKEEPVEEAEEEAPEASTAPKEAGPSKEASLWPCEKCGKMFTVH

SEQ ID NO: 23828 - protein, 70 aa, Synthetic construct
KDDNVFSDSSEQVNFDSEDSSCLPEDLSLSKQLKIQVKEEEASTAPKEAGPSKEASLWPCEKCGKMFTVH

SEQ ID NO: 23829 - protein, 70 aa, Synthetic construct
KDDNVFSDSSEQVNFDSEDSSCLPEDLSLSKQLKIQVKEEPVEEAPKEAGPSKEASLWPCEKCGKMFTVH

SEQ ID NO: 23830 - protein, 70 aa, Synthetic construct
KDDNVFSDSSEQVNFDSEDSSCLPEDLSLSKQLKIQVKEEPVEEAEEEAPPSKEASLWPCEKCGKMFTVH

SEQ ID NO: 23831 - protein, 70 aa, Synthetic construct
KDDNVFSDSSEQVNFDSEDSSCLPEDLSLSKQLKIQVKEEPVEEAEEEAPEASTASLWPCEKCGKMFTVH

SEQ ID NO: 23832 - protein, 70 aa, Synthetic construct
KDDNVFSDSSEQVNFDSEDSSCLPEDLSLSKQLKIQVKEEPVEEAEEEAPEASTAPKEAGEKCGKMFTVH

SEQ ID NO: 23833 - protein, 70 aa, Synthetic construct
KDDNVFSDSSEQVNFDSEDSSCLPEDLSLSKQLKIQVKEEPVEEAEEEAPEASTAPKEAGPSKEAMFTVH

SEQ ID NO: 23834 - protein, 70 aa, Synthetic construct
KDDNVFSDSSEQVNFDSEDSSCLPEDLSLSKQLKIQVKEEPVEEAEEEAPEASTAPKEAGPSKEASLWPC

SEQ ID NO: 23835 - protein, 70 aa, Synthetic construct
TPAPALPVQDPQLLHHCQHCDMYFADNILYTIHMGCHGYENPFQCNICGCKCKNKYDFACHFARGQHNQH

SEQ ID NO: 23836 - protein, 70 aa, Synthetic construct
TPSIGLPVQDPQLLHHCQHCDMYFADNILYTIHMGCHGYENPFQCNICGCKCKNKYDFACHFARGQHNQH

SEQ ID NO: 23837 - protein, 70 aa, Synthetic construct
TPSIGNSQPSPQLLHHCQHCDMYFADNILYTIHMGCHGYENPFQCNICGCKCKNKYDFACHFARGQHNQH

SEQ ID NO: 23838 - protein, 70 aa, Synthetic construct
TPSIGNSQPSTPAPAHCQHCDMYFADNILYTIHMGCHGYENPFQCNICGCKCKNKYDFACHFARGQHNQH

SEQ ID NO: 23839 - protein, 70 aa, Synthetic construct
TPSIGNSQPSTPAPALPVQDPQLLHHCQHCDMYFADNILYTIHMGCHGYENPFQCNICGCKCKNKYDFAC

SEQ ID NO: 23840 - protein, 70 aa, Synthetic construct
LEKESYLESRSSGAQQSLIDEDAFCCVCLDDECHNSNVILFCDICNLAVHQECYGVPYIPEGQWLCRCCL

SEQ ID NO: 23841 - protein, 70 aa, Synthetic construct
ADTFEYLESRSSGAQQSLIDEDAFCCVCLDDECHNSNVILFCDICNLAVHQECYGVPYIPEGQWLCRCCL

SEQ ID NO: 23842 - protein, 70 aa, Synthetic construct
ADTFELLVDRSSGAQQSLIDEDAFCCVCLDDECHNSNVILFCDICNLAVHQECYGVPYIPEGQWLCRCCL

SEQ ID NO: 23843 - protein, 70 aa, Synthetic construct
ADTFELLVDRLEKESQSLIDEDAFCCVCLDDECHNSNVILFCDICNLAVHQECYGVPYIPEGQWLCRCCL

SEQ ID NO: 23844 - protein, 70 aa, Synthetic construct
ADTFELLVDRLEKESYLESREDAFCCVCLDDECHNSNVILFCDICNLAVHQECYGVPYIPEGQWLCRCCL

SEQ ID NO: 23845 - protein, 70 aa, Synthetic construct
ADTFELLVDRLEKESYLESRSSGAQCVCLDDECHNSNVILFCDICNLAVHQECYGVPYIPEGQWLCRCCL

SEQ ID NO: 23846 - protein, 70 aa, Synthetic construct
ADTFELLVDRLEKESYLESRSSGAQQSLIDDECHNSNVILFCDICNLAVHQECYGVPYIPEGQWLCRCCL

SEQ ID NO: 23847 - protein, 70 aa, Synthetic construct
ADTFELLVDRLEKESYLESRSSGAQQSLIDEDAFCSNVILFCDICNLAVHQECYGVPYIPEGQWLCRCCL

SEQ ID NO: 23848 - protein, 70 aa, Synthetic construct
ADTFELLVDRLEKESYLESRSSGAQQSLIDEDAFCCVCLDFCDICNLAVHQECYGVPYIPEGQWLCRCCL

SEQ ID NO: 23849 - protein, 70 aa, Synthetic construct
ADTFELLVDRLEKESYLESRSSGAQQSLIDEDAFCCVCLDDECHNNLAVHQECYGVPYIPEGQWLCRCCL

SEQ ID NO: 23850 - protein, 70 aa, Synthetic construct
ADTFELLVDRLEKESYLESRSSGAQQSLIDEDAFCCVCLDDECHNSNVILQECYGVPYIPEGQWLCRCCL

SEQ ID NO: 23851 - protein, 70 aa, Synthetic construct
ADTFELLVDRLEKESYLESRSSGAQQSLIDEDAFCCVCLDDECHNSNVILFCDICNLAVHEGQWLCRCCL

SEQ ID NO: 23852 - protein, 70 aa, Synthetic construct
ADTFELLVDRLEKESYLESRSSGAQQSLIDEDAFCCVCLDDECHNSNVILFCDICNLAVHQECYGCRCCL

SEQ ID NO: 23853 - protein, 70 aa, Synthetic construct
ADTFELLVDRLEKESYLESRSSGAQQSLIDEDAFCCVCLDDECHNSNVILFCDICNLAVHQECYGVPYIP

SEQ ID NO: 23854 - protein, 70 aa, Synthetic construct
FLKPRKVEEDELLEKSPLQLGNEPLQRLLSDNGINRLSLMAPDTPAGTPLSGVGRRTSVLFKKAKNGVKL

SEQ ID NO: 23855 - protein, 70 aa, Synthetic construct
PINDSKVEEDELLEKSPLQLGNEPLQRLLSDNGINRLSLMAPDTPAGTPLSGVGRRTSVLFKKAKNGVKL

SEQ ID NO: 23856 - protein, 70 aa, Synthetic construct
PINDSKPPSRELLEKSPLQLGNEPLQRLLSDNGINRLSLMAPDTPAGTPLSGVGRRTSVLFKKAKNGVKL

SEQ ID NO: 23857 - protein, 70 aa, Synthetic construct
PINDSKPPSRFLKPRSPLQLGNEPLQRLLSDNGINRLSLMAPDTPAGTPLSGVGRRTSVLFKKAKNGVKL

SEQ ID NO: 23858 - protein, 70 aa, Synthetic construct
PINDSKPPSRFLKPRKVEEDGNEPLQRLLSDNGINRLSLMAPDTPAGTPLSGVGRRTSVLFKKAKNGVKL

SEQ ID NO: 23859 - protein, 70 aa, Synthetic construct
PINDSKPPSRFLKPRKVEEDELLEKQRLLSDNGINRLSLMAPDTPAGTPLSGVGRRTSVLFKKAKNGVKL

SEQ ID NO: 23860 - protein, 70 aa, Synthetic construct
PINDSKPPSRFLKPRKVEEDELLEKSPLQLDNGINRLSLMAPDTPAGTPLSGVGRRTSVLFKKAKNGVKL

SEQ ID NO: 23861 - protein, 70 aa, Synthetic construct
PINDSKPPSRFLKPRKVEEDELLEKSPLQLGNEPLRLSLMAPDTPAGTPLSGVGRRTSVLFKKAKNGVKL

SEQ ID NO: 23862 - protein, 70 aa, Synthetic construct
PINDSKPPSRFLKPRKVEEDELLEKSPLQLGNEPLQRLLSAPDTPAGTPLSGVGRRTSVLFKKAKNGVKL

SEQ ID NO: 23863 - protein, 70 aa, Synthetic construct
PINDSKPPSRFLKPRKVEEDELLEKSPLQLGNEPLQRLLSDNGINAGTPLSGVGRRTSVLFKKAKNGVKL

SEQ ID NO: 23864 - protein, 70 aa, Synthetic construct
PINDSKPPSRFLKPRKVEEDELLEKSPLQLGNEPLQRLLSDNGINRLSLMSGVGRRTSVLFKKAKNGVKL

SEQ ID NO: 23865 - protein, 70 aa, Synthetic construct
PINDSKPPSRFLKPRKVEEDELLEKSPLQLGNEPLQRLLSDNGINRLSLMAPDTPRTSVLFKKAKNGVKL

SEQ ID NO: 23866 - protein, 70 aa, Synthetic construct
PINDSKPPSRFLKPRKVEEDELLEKSPLQLGNEPLQRLLSDNGINRLSLMAPDTPAGTPLFKKAKNGVKL

SEQ ID NO: 23867 - protein, 70 aa, Synthetic construct
IDLINNLLQVKMRKRYSVDKSLSHPWLQEYQTWLDLRELEGKMGERYITHESDDARWEQFAAEHPLPGSG

SEQ ID NO: 23868 - protein, 70 aa, Synthetic construct
SPWSHNLLQVKMRKRYSVDKSLSHPWLQEYQTWLDLRELEGKMGERYITHESDDARWEQFAAEHPLPGSG

SEQ ID NO: 23869 - protein, 70 aa, Synthetic construct
SPWSHISAGAKMRKRYSVDKSLSHPWLQEYQTWLDLRELEGKMGERYITHESDDARWEQFAAEHPLPGSG

SEQ ID NO: 23870 - protein, 70 aa, Synthetic construct
SPWSHISAGAIDLINYSVDKSLSHPWLQEYQTWLDLRELEGKMGERYITHESDDARWEQFAAEHPLPGSG

SEQ ID NO: 23871 - protein, 70 aa, Synthetic construct
SPWSHISAGAIDLINNLLQVSLSHPWLQEYQTWLDLRELEGKMGERYITHESDDARWEQFAAEHPLPGSG

SEQ ID NO: 23872 - protein, 70 aa, Synthetic construct
SPWSHISAGAIDLINNLLQVKMRKRYSVDKSLSHPWLQEYQTWLDRYITHESDDARWEQFAAEHPLPGSG

SEQ ID NO: 23873 - protein, 70 aa, Synthetic construct
SPWSHISAGAIDLINNLLQVKMRKRYSVDKSLSHPWLQEYQTWLDLRELEESDDARWEQFAAEHPLPGSG

SEQ ID NO: 23874 - protein, 70 aa, Synthetic construct
SPWSHISAGAIDLINNLLQVKMRKRYSVDKSLSHPWLQEYQTWLDLRELEGKMGERWEQFAAEHPLPGSG

SEQ ID NO: 23875 - protein, 70 aa, Synthetic construct
SPWSHISAGAIDLINNLLQVKMRKRYSVDKSLSHPWLQEYQTWLDLRELEGKMGERYITHAAEHPLPGSG

SEQ ID NO: 23876 - protein, 70 aa, Synthetic construct
SPWSHISAGAIDLINNLLQVKMRKRYSVDKSLSHPWLQEYQTWLDLRELEGKMGERYITHESDDALPGSG

SEQ ID NO: 23877 - protein, 70 aa, Synthetic construct
SPWSHISAGAIDLINNLLQVKMRKRYSVDKSLSHPWLQEYQTWLDLRELEGKMGERYITHESDDARWEQF

SEQ ID NO: 23878 - protein, 70 aa, Synthetic construct
PLHKGKKAVNKDSLEYRLRRERNNIAVRKSRDKAKRRILETQQKVLEYMAENERLRSRVEQLTQELDTLR

SEQ ID NO: 23879 - protein, 70 aa, Synthetic construct
RKKRRHRTVFTAHQLEELEKAFSEAHYPDVYAREMLAVKTELPEDRIQVWFQNRRAKWRKREKRWGGSSV

SEQ ID NO: 23880 - protein, 70 aa, Synthetic construct
DLKASPTLGKRKKRRHRTVFTAHQLEELEKAFSEAHYPDVYAREMRIQVWFQNRRAKWRKREKRWGGSSV

SEQ ID NO: 23881 - protein, 70 aa, Synthetic construct
DLKASPTLGKRKKRRHRTVFTAHQLEELEKAFSEAHYPDVYAREMLAVKTELPEDRIQVWFQNRRAKWRK

SEQ ID NO: 23882 - protein, 70 aa, Synthetic construct
TCHVNFRMFSCPKESDPIQALRKLTLHTKEQILDMLVMEQFMISMPQELQVLVMMNGVQSCKDLEDLLRN

SEQ ID NO: 23883 - protein, 70 aa, Synthetic construct
TCHVNFRMFSCPKESDPIQALRKLTELCHLWLRPDLVMEQFMISMPQELQVLVMMNGVQSCKDLEDLLRN

SEQ ID NO: 23884 - protein, 70 aa, Synthetic construct
TCHVNFRMFSCPKESDPIQALRKLTELCHLWLRPDLHTKEQILDMLVMEQFMISMNGVQSCKDLEDLLRN

SEQ ID NO: 23885 - protein, 70 aa, Synthetic construct
TCHVNFRMFSCPKESDPIQALRKLTELCHLWLRPDLHTKEQILDMLVMEQFMISMPQELQCKDLEDLLRN

SEQ ID NO: 23886 - protein, 70 aa, Synthetic construct
TCHVNFRMFSCPKESDPIQALRKLTELCHLWLRPDLHTKEQILDMLVMEQFMISMPQELQVLVMMDLLRN

SEQ ID NO: 23887 - protein, 70 aa, Synthetic construct
TCHVNFRMFSCPKESDPIQALRKLTELCHLWLRPDLHTKEQILDMLVMEQFMISMPQELQVLVMMNGVQS

SEQ ID NO: 23888 - protein, 70 aa, Synthetic construct
EECSSLPVFPTNDLLLKTVENGLCSSSFPNSGGPSQNFTSNSSRVSVISGPQNTRSSHLNKKGNSASKRR

SEQ ID NO: 23889 - protein, 70 aa, Synthetic construct
RTSNSLPVFPTNDLLLKTVENGLCSSSFPNSGGPSQNFTSNSSRVSVISGPQNTRSSHLNKKGNSASKRR

SEQ ID NO: 23890 - protein, 70 aa, Synthetic construct
RTSNSKTSSITNDLLLKTVENGLCSSSFPNSGGPSQNFTSNSSRVSVISGPQNTRSSHLNKKGNSASKRR

SEQ ID NO: 23891 - protein, 70 aa, Synthetic construct
RTSNSKTSSIEECSSLKTVENGLCSSSFPNSGGPSQNFTSNSSRVSVISGPQNTRSSHLNKKGNSASKRR

SEQ ID NO: 23892 - protein, 70 aa, Synthetic construct
RTSNSKTSSIEECSSLPVFPNGLCSSSFPNSGGPSQNFTSNSSRVSVISGPQNTRSSHLNKKGNSASKRR

SEQ ID NO: 23893 - protein, 70 aa, Synthetic construct
RTSNSKTSSIEECSSLPVFPTNDLLSSFPNSGGPSQNFTSNSSRVSVISGPQNTRSSHLNKKGNSASKRR

SEQ ID NO: 23894 - protein, 70 aa, Synthetic construct
RTSNSKTSSIEECSSLPVFPTNDLLLKTVESGGPSQNFTSNSSRVSVISGPQNTRSSHLNKKGNSASKRR

SEQ ID NO: 23895 - protein, 70 aa, Synthetic construct
RTSNSKTSSIEECSSLPVFPTNDLLLKTVENGLCSQNFTSNSSRVSVISGPQNTRSSHLNKKGNSASKRR

SEQ ID NO: 23896 - protein, 70 aa, Synthetic construct
RTSNSKTSSIEECSSLPVFPTNDLLLKTVENGLCSSSFPNNSSRVSVISGPQNTRSSHLNKKGNSASKRR

SEQ ID NO: 23897 - protein, 70 aa, Synthetic construct
RTSNSKTSSIEECSSLPVFPTNDLLLKTVENGLCSSSFPNSGGPSQNFTSNSSRVSVISGPQNTRASKRR

SEQ ID NO: 23898 - protein, 70 aa, Synthetic construct
RTSNSKTSSIEECSSLPVFPTNDLLLKTVENGLCSSSFPNSGGPSQNFTSNSSRVSVISGPQNTRSSHLN

SEQ ID NO: 23899 - protein, 70 aa, Synthetic construct
PASAATAVAIQTIEEHPASFDWSSFKPMGFEVSFLKFLEESAVKQKKNTDKDHPNTGNKKGSHSNSRKNI

SEQ ID NO: 23900 - protein, 70 aa, Synthetic construct
PASAAELSSVQTIEEHPASFDWSSFKPMGFEVSFLKFLEESAVKQKKNTDKDHPNTGNKKGSHSNSRKNI

SEQ ID NO: 23901 - protein, 70 aa, Synthetic construct
PASAAELSSVRKEEEHPASFDWSSFKPMGFEVSFLKFLEESAVKQKKNTDKDHPNTGNKKGSHSNSRKNI

SEQ ID NO: 23902 - protein, 70 aa, Synthetic construct
PASAAELSSVRKEEETAVAIDWSSFKPMGFEVSFLKFLEESAVKQKKNTDKDHPNTGNKKGSHSNSRKNI

SEQ ID NO: 23903 - protein, 70 aa, Synthetic construct
PASAAELSSVRKEEETAVAIQTIEEKPMGFEVSFLKFLEESAVKQKKNTDKDHPNTGNKKGSHSNSRKNI

SEQ ID NO: 23904 - protein, 70 aa, Synthetic construct
PASAAELSSVRKEEETAVAIQTIEEHPASFEVSFLKFLEESAVKQKKNTDKDHPNTGNKKGSHSNSRKNI

SEQ ID NO: 23905 - protein, 70 aa, Synthetic construct
PASAAELSSVRKEEETAVAIQTIEEHPASFDWSSFKPMGFEVSFLKFLEEKDHPNTGNKKGSHSNSRKNI

SEQ ID NO: 23906 - protein, 70 aa, Synthetic construct
PASAAELSSVRKEEETAVAIQTIEEHPASFDWSSFKPMGFEVSFLKFLEESAVKQTGNKKGSHSNSRKNI

SEQ ID NO: 23907 - protein, 70 aa, Synthetic construct
PASAAELSSVRKEEETAVAIQTIEEHPASFDWSSFKPMGFEVSFLKFLEESAVKQKKNTDGSHSNSRKNI

SEQ ID NO: 23908 - protein, 70 aa, Synthetic construct
PASAAELSSVRKEEETAVAIQTIEEHPASFDWSSFKPMGFEVSFLKFLEESAVKQKKNTDKDHPNSRKNI

SEQ ID NO: 23909 - protein, 70 aa, Synthetic construct
PASAAELSSVRKEEETAVAIQTIEEHPASFDWSSFKPMGFEVSFLKFLEESAVKQKKNTDKDHPNTGNKK

SEQ ID NO: 23910 - protein, 70 aa, Synthetic construct
DKTAVTSGNHVCPCKESETFVQFANPSQLQCSDNVKIVLDKNLKDCTELVLKQLQEMKPTVSLKKLEVHS

SEQ ID NO: 23911 - protein, 70 aa, Synthetic construct
GSHSNTSGNHVCPCKESETFVQFANPSQLQCSDNVKIVLDKNLKDCTELVLKQLQEMKPTVSLKKLEVHS

SEQ ID NO: 23912 - protein, 70 aa, Synthetic construct
GSHSNSRKNIVCPCKESETFVQFANPSQLQCSDNVKIVLDKNLKDCTELVLKQLQEMKPTVSLKKLEVHS

SEQ ID NO: 23913 - protein, 70 aa, Synthetic construct
GSHSNSRKNIDKTAVTSGNHVQFANPSQLQCSDNVKIVLDKNLKDCTELVLKQLQEMKPTVSLKKLEVHS

SEQ ID NO: 23914 - protein, 70 aa, Synthetic construct
GSHSNSRKNIDKTAVTSGNHVCPCKPSQLQCSDNVKIVLDKNLKDCTELVLKQLQEMKPTVSLKKLEVHS

SEQ ID NO: 23915 - protein, 70 aa, Synthetic construct
PCKESETFVQDNVKIVLDKNLKDCTELVLKQLQEMKPTVSLKKLEVHSNDPDMSVMKDISIGKATGRGQY

SEQ ID NO: 23916 - protein, 70 aa, Synthetic construct
PCKESETFVQFANPSQLQCSDNVKIVLDKNLKDCTELVLKQLQEMKPTVSLKKLEMKDISIGKATGRGQY

SEQ ID NO: 23917 - protein, 70 aa, Synthetic construct
PCKESETFVQFANPSQLQCSDNVKIVLDKNLKDCTELVLKQLQEMKPTVSLKKLEVHSNDIGKATGRGQY

SEQ ID NO: 23918 - protein, 70 aa, Synthetic construct
PCKESETFVQFANPSQLQCSDNVKIVLDKNLKDCTELVLKQLQEMKPTVSLKKLEVHSNDPDMSVGRGQY

SEQ ID NO: 23919 - protein, 70 aa, Synthetic construct
PCKESETFVQFANPSQLQCSDNVKIVLDKNLKDCTELVLKQLQEMKPTVSLKKLEVHSNDPDMSVMKDIS

SEQ ID NO: 23920 - protein, 70 aa, Synthetic construct
NEASPSSMPDGTPPPQEAEEPSLLKKLLLAPANTQTQNHANHNHRIRTNPAIVKTENSWSNKAKSICQQQ

SEQ ID NO: 23921 - protein, 70 aa, Synthetic construct
ITKNFSEVGFPDILKAYEDDVLLIDVIQDDPDLFGVSNEGELSFTSEVPKISQEPNVAGEHQSTDSKYME

SEQ ID NO: 23922 - protein, 70 aa, Synthetic construct
PVSSESEVGFPDILKAYEDDVLLIDVIQDDPDLFGVSNEGELSFTSEVPKISQEPNVAGEHQSTDSKYME

SEQ ID NO: 23923 - protein, 70 aa, Synthetic construct
PVSSEVRGRKPDILKAYEDDVLLIDVIQDDPDLFGVSNEGELSFTSEVPKISQEPNVAGEHQSTDSKYME

SEQ ID NO: 23924 - protein, 70 aa, Synthetic construct
PVSSEVRGRKITKNFSEVGFVLLIDVIQDDPDLFGVSNEGELSFTSEVPKISQEPNVAGEHQSTDSKYME

SEQ ID NO: 23925 - protein, 70 aa, Synthetic construct
PVSSEVRGRKITKNFSEVGFPDILKAYEDDVLLIDVIQDDPDLFGVSNEGISQEPNVAGEHQSTDSKYME

SEQ ID NO: 23926 - protein, 70 aa, Synthetic construct
PVSSEVRGRKITKNFSEVGFPDILKAYEDDVLLIDVIQDDPDLFGVSNEGELSFTNVAGEHQSTDSKYME

SEQ ID NO: 23927 - protein, 70 aa, Synthetic construct
PVSSEVRGRKITKNFSEVGFPDILKAYEDDVLLIDVIQDDPDLFGVSNEGELSFTSEVPKISQEPSKYME

SEQ ID NO: 23928 - protein, 70 aa, Synthetic construct
PVSSEVRGRKITKNFSEVGFPDILKAYEDDVLLIDVIQDDPDLFGVSNEGELSFTSEVPKISQEPNVAGE

SEQ ID NO: 23929 - protein, 70 aa, Synthetic construct
VAAAAAAAASLPVSVAGGLLRGPPLLLRAAEKYPRTPKCARCRNHGVVSALKGHKRYCRWKDCLCAKCTL

SEQ ID NO: 23930 - protein, 70 aa, Synthetic construct
TGPPVAAAASLPVSVAGGLLRGPPLLLRAAEKYPRTPKCARCRNHGVVSALKGHKRYCRWKDCLCAKCTL

SEQ ID NO: 23931 - protein, 70 aa, Synthetic construct
TGPPVASVASLPVSVAGGLLRGPPLLLRAAEKYPRTPKCARCRNHGVVSALKGHKRYCRWKDCLCAKCTL

SEQ ID NO: 23932 - protein, 70 aa, Synthetic construct
TGPPVASVASVAAAAAGGLLRGPPLLLRAAEKYPRTPKCARCRNHGVVSALKGHKRYCRWKDCLCAKCTL

SEQ ID NO: 23933 - protein, 70 aa, Synthetic construct
TGPPVASVASVAAAAAAAASRGPPLLLRAAEKYPRTPKCARCRNHGVVSALKGHKRYCRWKDCLCAKCTL

SEQ ID NO: 23934 - protein, 70 aa, Synthetic construct
TGPPVASVASVAAAAAAAASLPVSVLLRAAEKYPRTPKCARCRNHGVVSALKGHKRYCRWKDCLCAKCTL

SEQ ID NO: 23935 - protein, 70 aa, Synthetic construct
TGPPVASVASVAAAAAAAASLPVSVAGGLLEKYPRTPKCARCRNHGVVSALKGHKRYCRWKDCLCAKCTL

SEQ ID NO: 23936 - protein, 70 aa, Synthetic construct
TGPPVASVASVAAAAAAAASLPVSVAGGLLRGPPLTPKCARCRNHGVVSALKGHKRYCRWKDCLCAKCTL

SEQ ID NO: 23937 - protein, 70 aa, Synthetic construct
HKDRDKEKRKEEKVRASGDAKIKKEKENGFSSPPQIKDEPEDDGYFVPPKEDIKPLKRPRDEDDADYKPK

SEQ ID NO: 23938 - protein, 70 aa, Synthetic construct
DGSSEKEKRKEEKVRASGDAKIKKEKENGFSSPPQIKDEPEDDGYFVPPKEDIKPLKRPRDEDDADYKPK

SEQ ID NO: 23939 - protein, 70 aa, Synthetic construct
DGSSEKHKDKHKDRDASGDAKIKKEKENGFSSPPQIKDEPEDDGYFVPPKEDIKPLKRPRDEDDADYKPK

SEQ ID NO: 23940 - protein, 70 aa, Synthetic construct
DGSSEKHKDKHKDRDKEKRKEEKVRKENGFSSPPQIKDEPEDDGYFVPPKEDIKPLKRPRDEDDADYKPK

SEQ ID NO: 23941 - protein, 70 aa, Synthetic construct
DGSSEKHKDKHKDRDKEKRKEEKVRASGDASSPPQIKDEPEDDGYFVPPKEDIKPLKRPRDEDDADYKPK

SEQ ID NO: 23942 - protein, 70 aa, Synthetic construct
DGSSEKHKDKHKDRDKEKRKEEKVRASGDAKIKKEKENGFEDDGYFVPPKEDIKPLKRPRDEDDADYKPK

SEQ ID NO: 23943 - protein, 70 aa, Synthetic construct
DGSSEKHKDKHKDRDKEKRKEEKVRASGDAKIKKEKENGFSSPPQFVPPKEDIKPLKRPRDEDDADYKPK

SEQ ID NO: 23944 - protein, 70 aa, Synthetic construct
DGSSEKHKDKHKDRDKEKRKEEKVRASGDAKIKKEKENGFSSPPQIKDEPEDIKPLKRPRDEDDADYKPK

SEQ ID NO: 23945 - protein, 70 aa, Synthetic construct
DGSSEKHKDKHKDRDKEKRKEEKVRASGDAKIKKEKENGFSSPPQIKDEPEDDGYLKRPRDEDDADYKPK

SEQ ID NO: 23946 - protein, 70 aa, Synthetic construct
DGSSEKHKDKHKDRDKEKRKEEKVRASGDAKIKKEKENGFSSPPQIKDEPEDDGYFVPPKDEDDADYKPK

SEQ ID NO: 23947 - protein, 70 aa, Synthetic construct
DGSSEKHKDKHKDRDKEKRKEEKVRASGDAKIKKEKENGFSSPPQIKDEPEDDGYFVPPKEDIKPLKRPR

SEQ ID NO: 23948 - protein, 70 aa, Synthetic construct
SILEDSTIFVAFKGNIDDKDFKWKLDAILKNVPNLLHMESSKLKVQKVEPWNSVRVTFNIPREAAERLRI

SEQ ID NO: 23949 - protein, 70 aa, Synthetic construct
GLEDDSTIFVAFKGNIDDKDFKWKLDAILKNVPNLLHMESSKLKVQKVEPWNSVRVTFNIPREAAERLRI

SEQ ID NO: 23950 - protein, 70 aa, Synthetic construct
GLEDDDTKSDSILEDSTIFVAFKGNIDDKDFKWKLDAILKSKLKVQKVEPWNSVRVTFNIPREAAERLRI

SEQ ID NO: 23951 - protein, 70 aa, Synthetic construct
GLEDDDTKSDSILEDSTIFVAFKGNIDDKDFKWKLDAILKNVPNLQKVEPWNSVRVTFNIPREAAERLRI

SEQ ID NO: 23952 - protein, 70 aa, Synthetic construct
GLEDDDTKSDSILEDSTIFVAFKGNIDDKDFKWKLDAILKNVPNLLHMESWNSVRVTFNIPREAAERLRI

SEQ ID NO: 23953 - protein, 70 aa, Synthetic construct
GLEDDDTKSDSILEDSTIFVAFKGNIDDKDFKWKLDAILKNVPNLLHMESSKLKVQKVEPWNSVRVTFNI

SEQ ID NO: 23954 - protein, 70 aa, Synthetic construct
SVLGPPVPEIKVKEEVEPMDIMRPVSAVPPLATNTVSPSLALLANNLSMPTSDLPPGASPRKKPRKQQHV

SEQ ID NO: 23955 - protein, 70 aa, Synthetic construct
PSVTVPVPEIKVKEEVEPMDIMRPVSAVPPLATNTVSPSLALLANNLSMPTSDLPPGASPRKKPRKQQHV

SEQ ID NO: 23956 - protein, 70 aa, Synthetic construct
PSVTVGGSLSKVKEEVEPMDIMRPVSAVPPLATNTVSPSLALLANNLSMPTSDLPPGASPRKKPRKQQHV

SEQ ID NO: 23957 - protein, 70 aa, Synthetic construct
PSVTVGGSLSSVLGPPVPEIKVKEESAVPPLATNTVSPSLALLANNLSMPTSDLPPGASPRKKPRKQQHV

SEQ ID NO: 23958 - protein, 70 aa, Synthetic construct
PSVTVGGSLSSVLGPPVPEIKVKEEVEPMDLATNTVSPSLALLANNLSMPTSDLPPGASPRKKPRKQQHV

SEQ ID NO: 23959 - protein, 70 aa, Synthetic construct
PSVTVGGSLSSVLGPPVPEIKVKEEVEPMDIMRPVVSPSLALLANNLSMPTSDLPPGASPRKKPRKQQHV

SEQ ID NO: 23960 - protein, 70 aa, Synthetic construct
PSVTVGGSLSSVLGPPVPEIKVKEEVEPMDIMRPVSAVPPALLANNLSMPTSDLPPGASPRKKPRKQQHV

SEQ ID NO: 23961 - protein, 70 aa, Synthetic construct
PSVTVGGSLSSVLGPPVPEIKVKEEVEPMDIMRPVSAVPPLATNTNLSMPTSDLPPGASPRKKPRKQQHV

SEQ ID NO: 23962 - protein, 70 aa, Synthetic construct
PSVTVGGSLSSVLGPPVPEIKVKEEVEPMDIMRPVSAVPPLATNTVSPSLTSDLPPGASPRKKPRKQQHV

SEQ ID NO: 23963 - protein, 70 aa, Synthetic construct
PSVTVGGSLSSVLGPPVPEIKVKEEVEPMDIMRPVSAVPPLATNTVSPSLALLANPGASPRKKPRKQQHV

SEQ ID NO: 23964 - protein, 70 aa, Synthetic construct
PSVTVGGSLSSVLGPPVPEIKVKEEVEPMDIMRPVSAVPPLATNTVSPSLALLANNLSMPRKKPRKQQHV

SEQ ID NO: 23965 - protein, 70 aa, Synthetic construct
PSVTVGGSLSSVLGPPVPEIKVKEEVEPMDIMRPVSAVPPLATNTVSPSLALLANNLSMPTSDLPKQQHV

SEQ ID NO: 23966 - protein, 70 aa, Synthetic construct
PSVTVGGSLSSVLGPPVPEIKVKEEVEPMDIMRPVSAVPPLATNTVSPSLALLANNLSMPTSDLPPGASP

SEQ ID NO: 23967 - protein, 70 aa, Synthetic construct
ESVTFRDVTVDFTQEEWQQLEPAQKDLYRDVMLENYRNLVSLDWEKNDISEDKLSVVGEATGGPTRNGAR

SEQ ID NO: 23968 - protein, 70 aa, Synthetic construct
ESVTFRDVTVDFTQEEWQQLEPAQKDLYRDVMLENYRNLVSLDWETRPEMEDKLSVVGEATGGPTRNGAR

SEQ ID NO: 23969 - protein, 70 aa, Synthetic construct
ESVTFRDVTVDFTQEEWQQLEPAQKDLYRDVMLENYRNLVSLDWETRPEMKELDPVVGEATGGPTRNGAR

SEQ ID NO: 23970 - protein, 70 aa, Synthetic construct
ESVTFRDVTVDFTQEEWQQLEPAQKDLYRDVMLENYRNLVSLDWETRPEMKELDPKNDISTGGPTRNGAR

SEQ ID NO: 23971 - protein, 70 aa, Synthetic construct
ESVTFRDVTVDFTQEEWQQLEPAQKDLYRDVMLENYRNLVSLDWETRPEMKELDPKNDISEDKLSRNGAR

SEQ ID NO: 23972 - protein, 70 aa, Synthetic construct
ESVTFRDVTVDFTQEEWQQLEPAQKDLYRDVMLENYRNLVSLDWETRPEMKELDPKNDISEDKLSVVGEA

SEQ ID NO: 23973 - protein, 70 aa, Synthetic construct
AKGAAPNAPRTRKKRCPYSKFQIRELEREFFFNVYINKEKRLQLSRMLNLTDRQVKIWFQNRRMKEKKLS

SEQ ID NO: 23974 - protein, 70 aa, Synthetic construct
GSAHSPNAPRTRKKRCPYSKFQIRELEREFFFNVYINKEKRLQLSRMLNLTDRQVKIWFQNRRMKEKKLS

SEQ ID NO: 23975 - protein, 70 aa, Synthetic construct
GSAHSVAKEPAKGAAPNAPRTRKKRLEREFFFNVYINKEKRLQLSRMLNLTDRQVKIWFQNRRMKEKKLS

SEQ ID NO: 23976 - protein, 70 aa, Synthetic construct
DDMSDPDLEASLDTLENNCHVGSDIDFRPKLVNGKGPLDNFLRNRIETSIGQSTVIIDLTEDSNEQPDSL

SEQ ID NO: 23977 - protein, 70 aa, Synthetic construct
DDMSDDQGTSSLDTLENNCHVGSDIDFRPKLVNGKGPLDNFLRNRIETSIGQSTVIIDLTEDSNEQPDSL

SEQ ID NO: 23978 - protein, 70 aa, Synthetic construct
DDMSDDQGTSVQSKSPDLEAVGSDIDFRPKLVNGKGPLDNFLRNRIETSIGQSTVIIDLTEDSNEQPDSL

SEQ ID NO: 23979 - protein, 70 aa, Synthetic construct
DDMSDDQGTSVQSKSPDLEASLDTLDFRPKLVNGKGPLDNFLRNRIETSIGQSTVIIDLTEDSNEQPDSL

SEQ ID NO: 23980 - protein, 70 aa, Synthetic construct
DDMSDDQGTSVQSKSPDLEASLDTLENNCHVGSDIGPLDNFLRNRIETSIGQSTVIIDLTEDSNEQPDSL

SEQ ID NO: 23981 - protein, 70 aa, Synthetic construct
DDMSDDQGTSVQSKSPDLEASLDTLENNCHVGSDIDFRPKFLRNRIETSIGQSTVIIDLTEDSNEQPDSL

SEQ ID NO: 23982 - protein, 70 aa, Synthetic construct
DDMSDDQGTSVQSKSPDLEASLDTLENNCHVGSDIDFRPKLVNGKIETSIGQSTVIIDLTEDSNEQPDSL

SEQ ID NO: 23983 - protein, 70 aa, Synthetic construct
RQMAADLLASAPAAKKVAVKVLVRDDQRQYLPGEVLRPPSLLPLQPSYYYPYYCLPGWALSTCAAAAGTQ

SEQ ID NO: 23984 - protein, 70 aa, Synthetic construct
FQNRRDLLASAPAAKKVAVKVLVRDDQRQYLPGEVLRPPSLLPLQPSYYYPYYCLPGWALSTCAAAAGTQ

SEQ ID NO: 23985 - protein, 70 aa, Synthetic construct
FQNRRYKTKRAPAAKKVAVKVLVRDDQRQYLPGEVLRPPSLLPLQPSYYYPYYCLPGWALSTCAAAAGTQ

SEQ ID NO: 23986 - protein, 70 aa, Synthetic construct
FQNRRYKTKRRQMAAKVAVKVLVRDDQRQYLPGEVLRPPSLLPLQPSYYYPYYCLPGWALSTCAAAAGTQ

SEQ ID NO: 23987 - protein, 70 aa, Synthetic construct
FQNRRYKTKRRQMAADLLASAPAAKDQRQYLPGEVLRPPSLLPLQPSYYYPYYCLPGWALSTCAAAAGTQ

SEQ ID NO: 23988 - protein, 70 aa, Synthetic construct
FQNRRYKTKRRQMAADLLASAPAAKKVAVKLPGEVLRPPSLLPLQPSYYYPYYCLPGWALSTCAAAAGTQ

SEQ ID NO: 23989 - protein, 70 aa, Synthetic construct
FQNRRYKTKRRQMAADLLASAPAAKKVAVKVLVRDLRPPSLLPLQPSYYYPYYCLPGWALSTCAAAAGTQ

SEQ ID NO: 23990 - protein, 70 aa, Synthetic construct
FQNRRYKTKRRQMAADLLASAPAAKKVAVKVLVRDDQRQYLLPLQPSYYYPYYCLPGWALSTCAAAAGTQ

SEQ ID NO: 23991 - protein, 70 aa, Synthetic construct
FQNRRYKTKRRQMAADLLASAPAAKKVAVKVLVRDDQRQYLPGEVPSYYYPYYCLPGWALSTCAAAAGTQ

SEQ ID NO: 23992 - protein, 70 aa, Synthetic construct
FQNRRYKTKRRQMAADLLASAPAAKKVAVKVLVRDDQRQYLPGEVLRPPSLLPLQPSYYYPYYCLAAGTQ

SEQ ID NO: 23993 - protein, 70 aa, Synthetic construct
FQNRRYKTKRRQMAADLLASAPAAKKVAVKVLVRDDQRQYLPGEVLRPPSLLPLQPSYYYPYYCLPGWAL

SEQ ID NO: 23994 - protein, 70 aa, Synthetic construct
ARAVDIMDICESILERKRHDSERSTCSILEQTDMEAVEALVCMSSWGQRSQKGDLLRIRPLTPVSDSGDV

SEQ ID NO: 23995 - protein, 70 aa, Synthetic construct
HTPDFIMDICESILERKRHDSERSTCSILEQTDMEAVEALVCMSSWGQRSQKGDLLRIRPLTPVSDSGDV

SEQ ID NO: 23996 - protein, 70 aa, Synthetic construct
HTPDFAGPDDARAVDRKRHDSERSTCSILEQTDMEAVEALVCMSSWGQRSQKGDLLRIRPLTPVSDSGDV

SEQ ID NO: 23997 - protein, 70 aa, Synthetic construct
HTPDFAGPDDARAVDIMDICSERSTCSILEQTDMEAVEALVCMSSWGQRSQKGDLLRIRPLTPVSDSGDV

SEQ ID NO: 23998 - protein, 70 aa, Synthetic construct
HTPDFAGPDDARAVDIMDICESILECSILEQTDMEAVEALVCMSSWGQRSQKGDLLRIRPLTPVSDSGDV

SEQ ID NO: 23999 - protein, 70 aa, Synthetic construct
HTPDFAGPDDARAVDIMDICESILERKRHDQTDMEAVEALVCMSSWGQRSQKGDLLRIRPLTPVSDSGDV

SEQ ID NO: 24000 - protein, 70 aa, Synthetic construct
HTPDFAGPDDARAVDIMDICESILERKRHDSERSTCSILEQTDMEAVEALVCMSSWGQRSLTPVSDSGDV

SEQ ID NO: 24001 - protein, 70 aa, Synthetic construct
HTPDFAGPDDARAVDIMDICESILERKRHDSERSTCSILEQTDMEAVEALVCMSSWGQRSQKGDLDSGDV

SEQ ID NO: 24002 - protein, 70 aa, Synthetic construct
HTPDFAGPDDARAVDIMDICESILERKRHDSERSTCSILEQTDMEAVEALVCMSSWGQRSQKGDLLRIRP

SEQ ID NO: 24003 - protein, 70 aa, Synthetic construct
SERSTCSILEQTDMEAVEALVCMSSLRIRPLTPVSDSGDVTTTVHMDAATPELPKDFHSLSTLCITPPQS

SEQ ID NO: 24004 - protein, 70 aa, Synthetic construct
SERSTCSILEQTDMEAVEALVCMSSWGQRSLTPVSDSGDVTTTVHMDAATPELPKDFHSLSTLCITPPQS

SEQ ID NO: 24005 - protein, 70 aa, Synthetic construct
SERSTCSILEQTDMEAVEALVCMSSWGQRSQKGDLDSGDVTTTVHMDAATPELPKDFHSLSTLCITPPQS

SEQ ID NO: 24006 - protein, 70 aa, Synthetic construct
SERSTCSILEQTDMEAVEALVCMSSWGQRSQKGDLLRIRPTTTVHMDAATPELPKDFHSLSTLCITPPQS

SEQ ID NO: 24007 - protein, 70 aa, Synthetic construct
SERSTCSILEQTDMEAVEALVCMSSWGQRSQKGDLLRIRPLTPVSMDAATPELPKDFHSLSTLCITPPQS

SEQ ID NO: 24008 - protein, 70 aa, Synthetic construct
SERSTCSILEQTDMEAVEALVCMSSWGQRSQKGDLLRIRPLTPVSDSGDVPELPKDFHSLSTLCITPPQS

SEQ ID NO: 24009 - protein, 70 aa, Synthetic construct
SERSTCSILEQTDMEAVEALVCMSSWGQRSQKGDLLRIRPLTPVSDSGDVTTTVHDFHSLSTLCITPPQS

SEQ ID NO: 24010 - protein, 70 aa, Synthetic construct
SERSTCSILEQTDMEAVEALVCMSSWGQRSQKGDLLRIRPLTPVSDSGDVTTTVHMDAATSTLCITPPQS

SEQ ID NO: 24011 - protein, 70 aa, Synthetic construct
SERSTCSILEQTDMEAVEALVCMSSWGQRSQKGDLLRIRPLTPVSDSGDVTTTVHMDAATPELPKTPPQS

SEQ ID NO: 24012 - protein, 70 aa, Synthetic construct
SERSTCSILEQTDMEAVEALVCMSSWGQRSQKGDLLRIRPLTPVSDSGDVTTTVHMDAATPELPKDFHSL

SEQ ID NO: 24013 - protein, 70 aa, Synthetic construct
ACTATDVLQSSAVVARALSGGAERGLLGLEPVPSSPCRAKGTSVIRHTGESPAACFPTIQTPDCRLSDSR

SEQ ID NO: 24014 - protein, 70 aa, Synthetic construct
PVSPQDVLQSSAVVARALSGGAERGLLGLEPVPSSPCRAKGTSVIRHTGESPAACFPTIQTPDCRLSDSR

SEQ ID NO: 24015 - protein, 70 aa, Synthetic construct
PVSPQVTDSKSAVVARALSGGAERGLLGLEPVPSSPCRAKGTSVIRHTGESPAACFPTIQTPDCRLSDSR

SEQ ID NO: 24016 - protein, 70 aa, Synthetic construct
PVSPQVTDSKACTATRALSGGAERGLLGLEPVPSSPCRAKGTSVIRHTGESPAACFPTIQTPDCRLSDSR

SEQ ID NO: 24017 - protein, 70 aa, Synthetic construct
PVSPQVTDSKACTATDVLQSGAERGLLGLEPVPSSPCRAKGTSVIRHTGESPAACFPTIQTPDCRLSDSR

SEQ ID NO: 24018 - protein, 70 aa, Synthetic construct
PVSPQVTDSKACTATDVLQSSAVVALLGLEPVPSSPCRAKGTSVIRHTGESPAACFPTIQTPDCRLSDSR

SEQ ID NO: 24019 - protein, 70 aa, Synthetic construct
PVSPQVTDSKACTATDVLQSSAVVARALSGPVPSSPCRAKGTSVIRHTGESPAACFPTIQTPDCRLSDSR

SEQ ID NO: 24020 - protein, 70 aa, Synthetic construct
PVSPQVTDSKACTATDVLQSSAVVARALSGGAERGPCRAKGTSVIRHTGESPAACFPTIQTPDCRLSDSR

SEQ ID NO: 24021 - protein, 70 aa, Synthetic construct
PVSPQVTDSKACTATDVLQSSAVVARALSGGAERGLLGLEGTSVIRHTGESPAACFPTIQTPDCRLSDSR

SEQ ID NO: 24022 - protein, 70 aa, Synthetic construct
PVSPQVTDSKACTATDVLQSSAVVARALSGGAERGLLGLEPVPSSPCRAKGTSVIRHTGETPDCRLSDSR

SEQ ID NO: 24023 - protein, 70 aa, Synthetic construct
PVSPQVTDSKACTATDVLQSSAVVARALSGGAERGLLGLEPVPSSPCRAKGTSVIRHTGESPAACLSDSR

SEQ ID NO: 24024 - protein, 70 aa, Synthetic construct
PVSPQVTDSKACTATDVLQSSAVVARALSGGAERGLLGLEPVPSSPCRAKGTSVIRHTGESPAACFPTIQ

SEQ ID NO: 24025 - protein, 70 aa, Synthetic construct
EPKIDFRVYNLLTPDSKMGEPVSESVVKREKLEEKDGLKEKVWTESSSDDLRNVTWRGADILRGSPSYTQ

SEQ ID NO: 24026 - protein, 70 aa, Synthetic construct
DGHAIFRVYNLLTPDSKMGEPVSESVVKREKLEEKDGLKEKVWTESSSDDLRNVTWRGADILRGSPSYTQ

SEQ ID NO: 24027 - protein, 70 aa, Synthetic construct
DGHAISTIKEEPKIDSKMGEPVSESVVKREKLEEKDGLKEKVWTESSSDDLRNVTWRGADILRGSPSYTQ

SEQ ID NO: 24028 - protein, 70 aa, Synthetic construct
DGHAISTIKEEPKIDFRVYNPVSESVVKREKLEEKDGLKEKVWTESSSDDLRNVTWRGADILRGSPSYTQ

SEQ ID NO: 24029 - protein, 70 aa, Synthetic construct
DGHAISTIKEEPKIDFRVYNLLTPDVVKREKLEEKDGLKEKVWTESSSDDLRNVTWRGADILRGSPSYTQ

SEQ ID NO: 24030 - protein, 70 aa, Synthetic construct
DGHAISTIKEEPKIDFRVYNLLTPDSKMGEKLEEKDGLKEKVWTESSSDDLRNVTWRGADILRGSPSYTQ

SEQ ID NO: 24031 - protein, 70 aa, Synthetic construct
DGHAISTIKEEPKIDFRVYNLLTPDSKMGEPVSESDGLKEKVWTESSSDDLRNVTWRGADILRGSPSYTQ

SEQ ID NO: 24032 - protein, 70 aa, Synthetic construct
DGHAISTIKEEPKIDFRVYNLLTPDSKMGEPVSESVVKREKVWTESSSDDLRNVTWRGADILRGSPSYTQ

SEQ ID NO: 24033 - protein, 70 aa, Synthetic construct
DGHAISTIKEEPKIDFRVYNLLTPDSKMGEPVSESVVKREKLEEKSSSDDLRNVTWRGADILRGSPSYTQ

SEQ ID NO: 24034 - protein, 70 aa, Synthetic construct
DGHAISTIKEEPKIDFRVYNLLTPDSKMGEPVSESVVKREKLEEKDGLKELRNVTWRGADILRGSPSYTQ

SEQ ID NO: 24035 - protein, 70 aa, Synthetic construct
DGHAISTIKEEPKIDFRVYNLLTPDSKMGEPVSESVVKREKLEEKDGLKEKVWTEWRGADILRGSPSYTQ

SEQ ID NO: 24036 - protein, 70 aa, Synthetic construct
DGHAISTIKEEPKIDFRVYNLLTPDSKMGEPVSESVVKREKLEEKDGLKEKVWTESSSDDILRGSPSYTQ

SEQ ID NO: 24037 - protein, 70 aa, Synthetic construct
DGHAISTIKEEPKIDFRVYNLLTPDSKMGEPVSESVVKREKLEEKDGLKEKVWTESSSDDLRNVTPSYTQ

SEQ ID NO: 24038 - protein, 70 aa, Synthetic construct
DGHAISTIKEEPKIDFRVYNLLTPDSKMGEPVSESVVKREKLEEKDGLKEKVWTESSSDDLRNVTWRGAD

SEQ ID NO: 24039 - protein, 70 aa, Synthetic construct
DWLRFWSKYKLSVPGNPHYLSHVPGLPNPCQNYVPYPTFNLPPHFSAVGSDNDIPLDLAIKHSRPGPTAN

SEQ ID NO: 24040 - protein, 70 aa, Synthetic construct
FVHNDFQSEADWLRFNPHYLSHVPGLPNPCQNYVPYPTFNLPPHFSAVGSDNDIPLDLAIKHSRPGPTAN

SEQ ID NO: 24041 - protein, 70 aa, Synthetic construct
FVHNDFQSEADWLRFWSKYKLSVPGNPHYLQNYVPYPTFNLPPHFSAVGSDNDIPLDLAIKHSRPGPTAN

SEQ ID NO: 24042 - protein, 70 aa, Synthetic construct
FVHNDFQSEADWLRFWSKYKLSVPGNPHYLSHVPGLPNPCQNYVPYPTFNDNDIPLDLAIKHSRPGPTAN

SEQ ID NO: 24043 - protein, 70 aa, Synthetic construct
FVHNDFQSEADWLRFWSKYKLSVPGNPHYLSHVPGLPNPCQNYVPYPTFNLPPHFSAVGSKHSRPGPTAN

SEQ ID NO: 24044 - protein, 70 aa, Synthetic construct
FVHNDFQSEADWLRFWSKYKLSVPGNPHYLSHVPGLPNPCQNYVPYPTFNLPPHFSAVGSDNDIPLDLAI

SEQ ID NO: 24045 - protein, 70 aa, Synthetic construct
LPPHFLDLAIKHSRPGPTANGASKEKTKAPPNVKNEGPLNVVKTEKVDRSTQDELSTKCVHCGIVFLDEV

SEQ ID NO: 24046 - protein, 70 aa, Synthetic construct
LPPHFSAVGSKHSRPGPTANGASKEKTKAPPNVKNEGPLNVVKTEKVDRSTQDELSTKCVHCGIVFLDEV

SEQ ID NO: 24047 - protein, 70 aa, Synthetic construct
LPPHFSAVGSDNDIPGPTANGASKEKTKAPPNVKNEGPLNVVKTEKVDRSTQDELSTKCVHCGIVFLDEV

SEQ ID NO: 24048 - protein, 70 aa, Synthetic construct
LPPHFSAVGSDNDIPLDLAIGASKEKTKAPPNVKNEGPLNVVKTEKVDRSTQDELSTKCVHCGIVFLDEV

SEQ ID NO: 24049 - protein, 70 aa, Synthetic construct
LPPHFSAVGSDNDIPLDLAIKHSRPGPTANGASKEEGPLNVVKTEKVDRSTQDELSTKCVHCGIVFLDEV

SEQ ID NO: 24050 - protein, 70 aa, Synthetic construct
LPPHFSAVGSDNDIPLDLAIKHSRPGPTANGASKEKTKAPVVKTEKVDRSTQDELSTKCVHCGIVFLDEV

SEQ ID NO: 24051 - protein, 70 aa, Synthetic construct
LPPHFSAVGSDNDIPLDLAIKHSRPGPTANGASKEKTKAPPNVKNEGPLNVVKTEKVDRSHCGIVFLDEV

SEQ ID NO: 24052 - protein, 70 aa, Synthetic construct
LPPHFSAVGSDNDIPLDLAIKHSRPGPTANGASKEKTKAPPNVKNEGPLNVVKTEKVDRSTQDELFLDEV

SEQ ID NO: 24053 - protein, 70 aa, Synthetic construct
LPPHFSAVGSDNDIPLDLAIKHSRPGPTANGASKEKTKAPPNVKNEGPLNVVKTEKVDRSTQDELSTKCV

SEQ ID NO: 24054 - protein, 70 aa, Synthetic construct
KPACRKKKTRTVFSRSQVFQLESTFDMKRYLSSSERAGLAASLHLTETQVKIWFQNRRNKWKRQLHAAAQ

SEQ ID NO: 24055 - protein, 70 aa, Synthetic construct
KPACRKKKTRTVFSRSQVFQLESTFDMKRYLSSSERAGLAASLHLTETQVKIWFQNRRNKWKRQLAAELE

SEQ ID NO: 24056 - protein, 70 aa, Synthetic construct
HARSTRKKRCPYTKHQTLELEKEFLFNMYLTRDRRYEVARLLNLTERQVKIWFQNRRMKMKKINKDRAKD

SEQ ID NO: 24057 - protein, 70 aa, Synthetic construct
GTNRPGLGQNENLSAIEGKGKVGGLKTRCSSCNVKFESESELQNHIQTIHRELVPDSNSTQLKTPQVSPM

SEQ ID NO: 24058 - protein, 70 aa, Synthetic construct
SASPGGLGQNENLSAIEGKGKVGGLKTRCSSCNVKFESESELQNHIQTIHRELVPDSNSTQLKTPQVSPM

SEQ ID NO: 24059 - protein, 70 aa, Synthetic construct
SASPGINVPPENLSAIEGKGKVGGLKTRCSSCNVKFESESELQNHIQTIHRELVPDSNSTQLKTPQVSPM

SEQ ID NO: 24060 - protein, 70 aa, Synthetic construct
SASPGINVPPGTNRPIEGKGKVGGLKTRCSSCNVKFESESELQNHIQTIHRELVPDSNSTQLKTPQVSPM

SEQ ID NO: 24061 - protein, 70 aa, Synthetic construct
SASPGINVPPGTNRPGLGQNKVGGLKTRCSSCNVKFESESELQNHIQTIHRELVPDSNSTQLKTPQVSPM

SEQ ID NO: 24062 - protein, 70 aa, Synthetic construct
SASPGINVPPGTNRPGLGQNENLSAKTRCSSCNVKFESESELQNHIQTIHRELVPDSNSTQLKTPQVSPM

SEQ ID NO: 24063 - protein, 70 aa, Synthetic construct
SASPGINVPPGTNRPGLGQNENLSAIEGKGKVGGLKTRCSSCNVKFESESELQNHIQTIHQLKTPQVSPM

SEQ ID NO: 24064 - protein, 70 aa, Synthetic construct
SASPGINVPPGTNRPGLGQNENLSAIEGKGKVGGLKTRCSSCNVKFESESELQNHIQTIHRELVPQVSPM

SEQ ID NO: 24065 - protein, 70 aa, Synthetic construct
SASPGINVPPGTNRPGLGQNENLSAIEGKGKVGGLKTRCSSCNVKFESESELQNHIQTIHRELVPDSNST

SEQ ID NO: 24066 - protein, 70 aa, Synthetic construct
AARGAEAFGDSEEDGEDVFEVEKILDMKTEGGKVLYKVRWKGYTSDDDTWEPEIHLEDCKEVLLEFRKKI

SEQ ID NO: 24067 - protein, 70 aa, Synthetic construct
VGVVGEAFGDSEEDGEDVFEVEKILDMKTEGGKVLYKVRWKGYTSDDDTWEPEIHLEDCKEVLLEFRKKI

SEQ ID NO: 24068 - protein, 70 aa, Synthetic construct
VGVVGEDNDASEEDGEDVFEVEKILDMKTEGGKVLYKVRWKGYTSDDDTWEPEIHLEDCKEVLLEFRKKI

SEQ ID NO: 24069 - protein, 70 aa, Synthetic construct
VGVVGEDNDAAARGAEDVFEVEKILDMKTEGGKVLYKVRWKGYTSDDDTWEPEIHLEDCKEVLLEFRKKI

SEQ ID NO: 24070 - protein, 70 aa, Synthetic construct
VGVVGEDNDAAARGAEAFGDSEEDGEDVFEVEKILYKVRWKGYTSDDDTWEPEIHLEDCKEVLLEFRKKI

SEQ ID NO: 24071 - protein, 70 aa, Synthetic construct
VGVVGEDNDAAARGAEAFGDSEEDGEDVFEVEKILDMKTEGGKVLYKVRWKGYTSDDDTWEPEIHFRKKI

SEQ ID NO: 24072 - protein, 70 aa, Synthetic construct
VGVVGEDNDAAARGAEAFGDSEEDGEDVFEVEKILDMKTEGGKVLYKVRWKGYTSDDDTWEPEIHLEDCK

SEQ ID NO: 24073 - protein, 70 aa, Synthetic construct
WSSDCIKATKPLLMEQYCSIKIVDILEEEVVTFAVEVELPNSGKLLDHVLIEMGYGLKPSGQDSKKENAD

SEQ ID NO: 24074 - protein, 70 aa, Synthetic construct
VANVIPAEGNWSSDCQYCSIKIVDILEEEVVTFAVEVELPNSGKLLDHVLIEMGYGLKPSGQDSKKENAD

SEQ ID NO: 24075 - protein, 70 aa, Synthetic construct
VANVIPAEGNWSSDCIKATKPLLMEQYCSIKIVDILEEEVVTFAVEVELPNSGKLLDHVLIEMGYKENAD

SEQ ID NO: 24076 - protein, 70 aa, Synthetic construct
VANVIPAEGNWSSDCIKATKPLLMEQYCSIKIVDILEEEVVTFAVEVELPNSGKLLDHVLIEMGYGLKPS

SEQ ID NO: 24077 - protein, 70 aa, Synthetic construct
EKCSENGTVDVADKLVTFGLAKNITPQRQSALNTEKMYRMNCCCTELQKQVEKHEHILLFLLNNSTNQNK

SEQ ID NO: 24078 - protein, 70 aa, Synthetic construct
ITKNVNGTVDVADKLVTFGLAKNITPQRQSALNTEKMYRMNCCCTELQKQVEKHEHILLFLLNNSTNQNK

SEQ ID NO: 24079 - protein, 70 aa, Synthetic construct
ITKNVHTVSVVADKLVTFGLAKNITPQRQSALNTEKMYRMNCCCTELQKQVEKHEHILLFLLNNSTNQNK

SEQ ID NO: 24080 - protein, 70 aa, Synthetic construct
ITKNVHTVSVEKCSEVTFGLAKNITPQRQSALNTEKMYRMNCCCTELQKQVEKHEHILLFLLNNSTNQNK

SEQ ID NO: 24081 - protein, 70 aa, Synthetic construct
ITKNVHTVSVEKCSENGTVDAKNITPQRQSALNTEKMYRMNCCCTELQKQVEKHEHILLFLLNNSTNQNK

SEQ ID NO: 24082 - protein, 70 aa, Synthetic construct
ITKNVHTVSVEKCSENGTVDVADKLPQRQSALNTEKMYRMNCCCTELQKQVEKHEHILLFLLNNSTNQNK

SEQ ID NO: 24083 - protein, 70 aa, Synthetic construct
ITKNVHTVSVEKCSENGTVDVADKLVTFGLAKNITKMYRMNCCCTELQKQVEKHEHILLFLLNNSTNQNK

SEQ ID NO: 24084 - protein, 70 aa, Synthetic construct
ITKNVHTVSVEKCSENGTVDVADKLVTFGLAKNITPQRQSNCCCTELQKQVEKHEHILLFLLNNSTNQNK

SEQ ID NO: 24085 - protein, 70 aa, Synthetic construct
ITKNVHTVSVEKCSENGTVDVADKLVTFGLAKNITPQRQSALNTEKMYRMVEKHEHILLFLLNNSTNQNK

SEQ ID NO: 24086 - protein, 70 aa, Synthetic construct
CADCGRHQRIHTGEKPYKCSDCGKSFIRSSHLIQHRRTHTGEKPYKCPECGKSFSQSSNLITHVRTHMDE

SEQ ID NO: 24087 - protein, 70 aa, Synthetic construct
SEAGPGPRPLARSASPPKAKNLNGGLRRSVAPAAPTSCDFSPGDLVWAKMEGYPWWPCLVYNHPFDGTFI

SEQ ID NO: 24088 - protein, 70 aa, Synthetic construct
SPSPGGPRPLARSASPPKAKNLNGGLRRSVAPAAPTSCDFSPGDLVWAKMEGYPWWPCLVYNHPFDGTFI

SEQ ID NO: 24089 - protein, 70 aa, Synthetic construct
SPSPGGDAAWARSASPPKAKNLNGGLRRSVAPAAPTSCDFSPGDLVWAKMEGYPWWPCLVYNHPFDGTFI

SEQ ID NO: 24090 - protein, 70 aa, Synthetic construct
SPSPGGDAAWSEAGPPPKAKNLNGGLRRSVAPAAPTSCDFSPGDLVWAKMEGYPWWPCLVYNHPFDGTFI

SEQ ID NO: 24091 - protein, 70 aa, Synthetic construct
SPSPGGDAAWSEAGPGPRPLNLNGGLRRSVAPAAPTSCDFSPGDLVWAKMEGYPWWPCLVYNHPFDGTFI

SEQ ID NO: 24092 - protein, 70 aa, Synthetic construct
SPSPGGDAAWSEAGPGPRPLARSASLRRSVAPAAPTSCDFSPGDLVWAKMEGYPWWPCLVYNHPFDGTFI

SEQ ID NO: 24093 - protein, 70 aa, Synthetic construct
SPSPGGDAAWSEAGPGPRPLARSASPPKAKAPAAPTSCDFSPGDLVWAKMEGYPWWPCLVYNHPFDGTFI

SEQ ID NO: 24094 - protein, 70 aa, Synthetic construct
SPSPGGDAAWSEAGPGPRPLARSASPPKAKNLNGGTSCDFSPGDLVWAKMEGYPWWPCLVYNHPFDGTFI

SEQ ID NO: 24095 - protein, 70 aa, Synthetic construct
SPSPGGDAAWSEAGPGPRPLARSASPPKAKNLNGGLRRSVSPGDLVWAKMEGYPWWPCLVYNHPFDGTFI

SEQ ID NO: 24096 - protein, 70 aa, Synthetic construct
SPCPRSAPIPQASPIPHPHVYQPPPLGHPATLFGTPPRFSFHHPYFLPGPHYFPSSTCPYSRPPFGYGNF

SEQ ID NO: 24097 - protein, 70 aa, Synthetic construct
IQPPRSAPIPQASPIPHPHVYQPPPLGHPATLFGTPPRFSFHHPYFLPGPHYFPSSTCPYSRPPFGYGNF

SEQ ID NO: 24098 - protein, 70 aa, Synthetic construct
IQPPREYSSVQASPIPHPHVYQPPPLGHPATLFGTPPRFSFHHPYFLPGPHYFPSSTCPYSRPPFGYGNF

SEQ ID NO: 24099 - protein, 70 aa, Synthetic construct
IQPPREYSSVSPCPRPHPHVYQPPPLGHPATLFGTPPRFSFHHPYFLPGPHYFPSSTCPYSRPPFGYGNF

SEQ ID NO: 24100 - protein, 70 aa, Synthetic construct
IQPPREYSSVSPCPRSAPIPYQPPPLGHPATLFGTPPRFSFHHPYFLPGPHYFPSSTCPYSRPPFGYGNF

SEQ ID NO: 24101 - protein, 70 aa, Synthetic construct
IQPPREYSSVSPCPRSAPIPQASPILGHPATLFGTPPRFSFHHPYFLPGPHYFPSSTCPYSRPPFGYGNF

SEQ ID NO: 24102 - protein, 70 aa, Synthetic construct
IQPPREYSSVSPCPRSAPIPQASPIPHPHVTLFGTPPRFSFHHPYFLPGPHYFPSSTCPYSRPPFGYGNF

SEQ ID NO: 24103 - protein, 70 aa, Synthetic construct
IQPPREYSSVSPCPRSAPIPQASPIPHPHVYQPPPPPRFSFHHPYFLPGPHYFPSSTCPYSRPPFGYGNF

SEQ ID NO: 24104 - protein, 70 aa, Synthetic construct
IQPPREYSSVSPCPRSAPIPQASPIPHPHVYQPPPLGHPAFHHPYFLPGPHYFPSSTCPYSRPPFGYGNF

SEQ ID NO: 24105 - protein, 70 aa, Synthetic construct
IQPPREYSSVSPCPRSAPIPQASPIPHPHVYQPPPLGHPATLFGTPPRFSFHHPYFLPGPHYFPSGYGNF

SEQ ID NO: 24106 - protein, 70 aa, Synthetic construct
IQPPREYSSVSPCPRSAPIPQASPIPHPHVYQPPPLGHPATLFGTPPRFSFHHPYFLPGPHYFPSSTCPY

SEQ ID NO: 24107 - protein, 70 aa, Synthetic construct
GQPRLCRQPLTRALWGARSPKRPRLQLPGAPSPLEKASRRVLAVVLEDVMAVHMVPVVPSKQTSIPQHHS

SEQ ID NO: 24108 - protein, 70 aa, Synthetic construct
MDLPGCRQPLTRALWGARSPKRPRLQLPGAPSPLEKASRRVLAVVLEDVMAVHMVPVVPSKQTSIPQHHS

SEQ ID NO: 24109 - protein, 70 aa, Synthetic construct
MDLPGDSSPPTRALWGARSPKRPRLQLPGAPSPLEKASRRVLAVVLEDVMAVHMVPVVPSKQTSIPQHHS

SEQ ID NO: 24110 - protein, 70 aa, Synthetic construct
MDLPGDSSPPGQPRLGARSPKRPRLQLPGAPSPLEKASRRVLAVVLEDVMAVHMVPVVPSKQTSIPQHHS

SEQ ID NO: 24111 - protein, 70 aa, Synthetic construct
MDLPGDSSPPGQPRLCRQPLKRPRLQLPGAPSPLEKASRRVLAVVLEDVMAVHMVPVVPSKQTSIPQHHS

SEQ ID NO: 24112 - protein, 70 aa, Synthetic construct
MDLPGDSSPPGQPRLCRQPLTRALWQLPGAPSPLEKASRRVLAVVLEDVMAVHMVPVVPSKQTSIPQHHS

SEQ ID NO: 24113 - protein, 70 aa, Synthetic construct
MDLPGDSSPPGQPRLCRQPLTRALWGARSPPSPLEKASRRVLAVVLEDVMAVHMVPVVPSKQTSIPQHHS

SEQ ID NO: 24114 - protein, 70 aa, Synthetic construct
MDLPGDSSPPGQPRLCRQPLTRALWGARSPKRPRLQLPGAVLAVVLEDVMAVHMVPVVPSKQTSIPQHHS

SEQ ID NO: 24115 - protein, 70 aa, Synthetic construct
MDLPGDSSPPGQPRLCRQPLTRALWGARSPKRPRLQLPGAPSPLEKASRRVLAVVLEDVMKQTSIPQHHS

SEQ ID NO: 24116 - protein, 70 aa, Synthetic construct
MDLPGDSSPPGQPRLCRQPLTRALWGARSPKRPRLQLPGAPSPLEKASRRVLAVVLEDVMAVHMVPQHHS

SEQ ID NO: 24117 - protein, 70 aa, Synthetic construct
MDLPGDSSPPGQPRLCRQPLTRALWGARSPKRPRLQLPGAPSPLEKASRRVLAVVLEDVMAVHMVPVVPS

SEQ ID NO: 24118 - protein, 70 aa, Synthetic construct
KTEPVAIFSHQSETTAPPPAPTQALPEFTSIFSSHQTAAPEVNNIFIKQELPTPDLHLSVPTQQGHLYQL

SEQ ID NO: 24119 - protein, 70 aa, Synthetic construct
KSQRPAIFSHQSETTAPPPAPTQALPEFTSIFSSHQTAAPEVNNIFIKQELPTPDLHLSVPTQQGHLYQL

SEQ ID NO: 24120 - protein, 70 aa, Synthetic construct
KSQRPCVTHIQSETTAPPPAPTQALPEFTSIFSSHQTAAPEVNNIFIKQELPTPDLHLSVPTQQGHLYQL

SEQ ID NO: 24121 - protein, 70 aa, Synthetic construct
KSQRPCVTHIKTEPVAPPPAPTQALPEFTSIFSSHQTAAPEVNNIFIKQELPTPDLHLSVPTQQGHLYQL

SEQ ID NO: 24122 - protein, 70 aa, Synthetic construct
KSQRPCVTHIKTEPVAIFSHPTQALPEFTSIFSSHQTAAPEVNNIFIKQELPTPDLHLSVPTQQGHLYQL

SEQ ID NO: 24123 - protein, 70 aa, Synthetic construct
KSQRPCVTHIKTEPVAIFSHQSETTPEFTSIFSSHQTAAPEVNNIFIKQELPTPDLHLSVPTQQGHLYQL

SEQ ID NO: 24124 - protein, 70 aa, Synthetic construct
KSQRPCVTHIKTEPVAIFSHQSETTAPPPAIFSSHQTAAPEVNNIFIKQELPTPDLHLSVPTQQGHLYQL

SEQ ID NO: 24125 - protein, 70 aa, Synthetic construct
KSQRPCVTHIKTEPVAIFSHQSETTAPPPAPTQALQTAAPEVNNIFIKQELPTPDLHLSVPTQQGHLYQL

SEQ ID NO: 24126 - protein, 70 aa, Synthetic construct
KSQRPCVTHIKTEPVAIFSHQSETTAPPPAPTQALPEFTSEVNNIFIKQELPTPDLHLSVPTQQGHLYQL

SEQ ID NO: 24127 - protein, 70 aa, Synthetic construct
KSQRPCVTHIKTEPVAIFSHQSETTAPPPAPTQALPEFTSIFSSHFIKQELPTPDLHLSVPTQQGHLYQL

SEQ ID NO: 24128 - protein, 70 aa, Synthetic construct
KSQRPCVTHIKTEPVAIFSHQSETTAPPPAPTQALPEFTSIFSSHQTAAPLPTPDLHLSVPTQQGHLYQL

SEQ ID NO: 24129 - protein, 70 aa, Synthetic construct
KSQRPCVTHIKTEPVAIFSHQSETTAPPPAPTQALPEFTSIFSSHQTAAPEVNNILHLSVPTQQGHLYQL

SEQ ID NO: 24130 - protein, 70 aa, Synthetic construct
KSQRPCVTHIKTEPVAIFSHQSETTAPPPAPTQALPEFTSIFSSHQTAAPEVNNIFIKQEPTQQGHLYQL

SEQ ID NO: 24131 - protein, 70 aa, Synthetic construct
KSQRPCVTHIKTEPVAIFSHQSETTAPPPAPTQALPEFTSIFSSHQTAAPEVNNIFIKQELPTPDHLYQL

SEQ ID NO: 24132 - protein, 70 aa, Synthetic construct
KSQRPCVTHIKTEPVAIFSHQSETTAPPPAPTQALPEFTSIFSSHQTAAPEVNNIFIKQELPTPDLHLSV

SEQ ID NO: 24133 - protein, 70 aa, Synthetic construct
GLPWGAAPGRARKKRKPYTKQQIAELENEFLVNEFINRQKRKELSNRLNLSDQQVKIWFQNRRMKKKRVV

SEQ ID NO: 24134 - protein, 70 aa, Synthetic construct
MSGPVNTHRPREYWDYESHVVEWGNQDDYQLVRKLGRGKYSEVFEAINITNNEKVVVKILKPVKKKKIKR

SEQ ID NO: 24135 - protein, 70 aa, Synthetic construct
MSGPVPSRARREYWDYESHVVEWGNQDDYQLVRKLGRGKYSEVFEAINITNNEKVVVKILKPVKKKKIKR

SEQ ID NO: 24136 - protein, 70 aa, Synthetic construct
MSGPVPSRARVYTDVYESHVVEWGNQDDYQLVRKLGRGKYSEVFEAINITNNEKVVVKILKPVKKKKIKR

SEQ ID NO: 24137 - protein, 70 aa, Synthetic construct
MSGPVPSRARVYTDVNTHRPVEWGNQDDYQLVRKLGRGKYSEVFEAINITNNEKVVVKILKPVKKKKIKR

SEQ ID NO: 24138 - protein, 70 aa, Synthetic construct
MSGPVPSRARVYTDVNTHRPREYWDQDDYQLVRKLGRGKYSEVFEAINITNNEKVVVKILKPVKKKKIKR

SEQ ID NO: 24139 - protein, 70 aa, Synthetic construct
MSGPVPSRARVYTDVNTHRPREYWDYESHVLVRKLGRGKYSEVFEAINITNNEKVVVKILKPVKKKKIKR

SEQ ID NO: 24140 - protein, 70 aa, Synthetic construct
MSGPVPSRARVYTDVNTHRPREYWDYESHVVEWGNQDDYQSEVFEAINITNNEKVVVKILKPVKKKKIKR

SEQ ID NO: 24141 - protein, 70 aa, Synthetic construct
MSGPVPSRARVYTDVNTHRPREYWDYESHVVEWGNQDDYQLVRKLAINITNNEKVVVKILKPVKKKKIKR

SEQ ID NO: 24142 - protein, 70 aa, Synthetic construct
MSGPVPSRARVYTDVNTHRPREYWDYESHVVEWGNQDDYQLVRKLGRGKYSEVFEVVKILKPVKKKKIKR

SEQ ID NO: 24143 - protein, 70 aa, Synthetic construct
MSGPVPSRARVYTDVNTHRPREYWDYESHVVEWGNQDDYQLVRKLGRGKYSEVFEAINITNNEKVVVKIL

SEQ ID NO: 24144 - protein, 70 aa, Synthetic construct
DTLGSFSTVFGEEWKEKTDRDFVKFWKDIVDDNEVRDLISDRNKSHEGTSGEWIWESLFHPPRKLGINDI

SEQ ID NO: 24145 - protein, 70 aa, Synthetic construct
LLLANFSTVFGEEWKEKTDRDFVKFWKDIVDDNEVRDLISDRNKSHEGTSGEWIWESLFHPPRKLGINDI

SEQ ID NO: 24146 - protein, 70 aa, Synthetic construct
LLLANAGVFDGEEWKEKTDRDFVKFWKDIVDDNEVRDLISDRNKSHEGTSGEWIWESLFHPPRKLGINDI

SEQ ID NO: 24147 - protein, 70 aa, Synthetic construct
LLLANAGVFDDTLGSEKTDRDFVKFWKDIVDDNEVRDLISDRNKSHEGTSGEWIWESLFHPPRKLGINDI

SEQ ID NO: 24148 - protein, 70 aa, Synthetic construct
LLLANAGVFDDTLGSFSTVFDFVKFWKDIVDDNEVRDLISDRNKSHEGTSGEWIWESLFHPPRKLGINDI

SEQ ID NO: 24149 - protein, 70 aa, Synthetic construct
LLLANAGVFDDTLGSFSTVFGEEWKWKDIVDDNEVRDLISDRNKSHEGTSGEWIWESLFHPPRKLGINDI

SEQ ID NO: 24150 - protein, 70 aa, Synthetic construct
LLLANAGVFDDTLGSFSTVFGEEWKEKTDRDFVKFWKDIVDRNKSHEGTSGEWIWESLFHPPRKLGINDI

SEQ ID NO: 24151 - protein, 70 aa, Synthetic construct
LLLANAGVFDDTLGSFSTVFGEEWKEKTDRDFVKFWKDIVDDNEVHEGTSGEWIWESLFHPPRKLGINDI

SEQ ID NO: 24152 - protein, 70 aa, Synthetic construct
LLLANAGVFDDTLGSFSTVFGEEWKEKTDRDFVKFWKDIVDDNEVRDLISGEWIWESLFHPPRKLGINDI

SEQ ID NO: 24153 - protein, 70 aa, Synthetic construct
LLLANAGVFDDTLGSFSTVFGEEWKEKTDRDFVKFWKDIVDDNEVRDLISDRNKSHEGTSGEWIWGINDI

SEQ ID NO: 24154 - protein, 70 aa, Synthetic construct
LLLANAGVFDDTLGSFSTVFGEEWKEKTDRDFVKFWKDIVDDNEVRDLISDRNKSHEGTSGEWIWESLFH

SEQ ID NO: 24155 - protein, 70 aa, Synthetic construct
QEASNAATQQFSGTDLLNGPLASSLNSDVPQQRPSVVVSPHSTTSVIQGHQIIAVPDSGSKVSHSPALSS

SEQ ID NO: 24156 - protein, 70 aa, Synthetic construct
TLGGSAATQQFSGTDLLNGPLASSLNSDVPQQRPSVVVSPHSTTSVIQGHQIIAVPDSGSKVSHSPALSS

SEQ ID NO: 24157 - protein, 70 aa, Synthetic construct
TLGGSSVSSIFSGTDLLNGPLASSLNSDVPQQRPSVVVSPHSTTSVIQGHQIIAVPDSGSKVSHSPALSS

SEQ ID NO: 24158 - protein, 70 aa, Synthetic construct
TLGGSSVSSIQEASNLLNGPLASSLNSDVPQQRPSVVVSPHSTTSVIQGHQIIAVPDSGSKVSHSPALSS

SEQ ID NO: 24159 - protein, 70 aa, Synthetic construct
TLGGSSVSSIQEASNAATQQLASSLNSDVPQQRPSVVVSPHSTTSVIQGHQIIAVPDSGSKVSHSPALSS

SEQ ID NO: 24160 - protein, 70 aa, Synthetic construct
TLGGSSVSSIQEASNAATQQFSGTDNSDVPQQRPSVVVSPHSTTSVIQGHQIIAVPDSGSKVSHSPALSS

SEQ ID NO: 24161 - protein, 70 aa, Synthetic construct
TLGGSSVSSIQEASNAATQQFSGTDLLNGPQQRPSVVVSPHSTTSVIQGHQIIAVPDSGSKVSHSPALSS

SEQ ID NO: 24162 - protein, 70 aa, Synthetic construct
TLGGSSVSSIQEASNAATQQFSGTDLLNGPLASSLNSDVPQQRPSVIQGHQIIAVPDSGSKVSHSPALSS

SEQ ID NO: 24163 - protein, 70 aa, Synthetic construct
TLGGSSVSSIQEASNAATQQFSGTDLLNGPLASSLNSDVPQQRPSVVVSPHSTTSVIQGHKVSHSPALSS

SEQ ID NO: 24164 - protein, 70 aa, Synthetic construct
TLGGSSVSSIQEASNAATQQFSGTDLLNGPLASSLNSDVPQQRPSVVVSPHSTTSVIQGHQIIAVPALSS

SEQ ID NO: 24165 - protein, 70 aa, Synthetic construct
TLGGSSVSSIQEASNAATQQFSGTDLLNGPLASSLNSDVPQQRPSVVVSPHSTTSVIQGHQIIAVPDSGS

SEQ ID NO: 24166 - protein, 70 aa, Synthetic construct
TYLPANVPIIKTEPTDDYEPAPTCGPVSQGLSPLPRPYYSQQLAMPPDPSSCLVAGFPPCPQRSTLMPAA

SEQ ID NO: 24167 - protein, 70 aa, Synthetic construct
KRKRSNVPIIKTEPTDDYEPAPTCGPVSQGLSPLPRPYYSQQLAMPPDPSSCLVAGFPPCPQRSTLMPAA

SEQ ID NO: 24168 - protein, 70 aa, Synthetic construct
KRKRSQYQRFKTEPTDDYEPAPTCGPVSQGLSPLPRPYYSQQLAMPPDPSSCLVAGFPPCPQRSTLMPAA

SEQ ID NO: 24169 - protein, 70 aa, Synthetic construct
KRKRSQYQRFTYLPANVPIIKTEPTPVSQGLSPLPRPYYSQQLAMPPDPSSCLVAGFPPCPQRSTLMPAA

SEQ ID NO: 24170 - protein, 70 aa, Synthetic construct
KRKRSQYQRFTYLPANVPIIKTEPTDDYEPLSPLPRPYYSQQLAMPPDPSSCLVAGFPPCPQRSTLMPAA

SEQ ID NO: 24171 - protein, 70 aa, Synthetic construct
KRKRSQYQRFTYLPANVPIIKTEPTDDYEPAPTCGRPYYSQQLAMPPDPSSCLVAGFPPCPQRSTLMPAA

SEQ ID NO: 24172 - protein, 70 aa, Synthetic construct
KRKRSQYQRFTYLPANVPIIKTEPTDDYEPAPTCGPVSQGQQLAMPPDPSSCLVAGFPPCPQRSTLMPAA

SEQ ID NO: 24173 - protein, 70 aa, Synthetic construct
KRKRSQYQRFTYLPANVPIIKTEPTDDYEPAPTCGPVSQGLSPLPPPDPSSCLVAGFPPCPQRSTLMPAA

SEQ ID NO: 24174 - protein, 70 aa, Synthetic construct
KRKRSQYQRFTYLPANVPIIKTEPTDDYEPAPTCGPVSQGLSPLPRPYYSSCLVAGFPPCPQRSTLMPAA

SEQ ID NO: 24175 - protein, 70 aa, Synthetic construct
KRKRSQYQRFTYLPANVPIIKTEPTDDYEPAPTCGPVSQGLSPLPRPYYSQQLAMGFPPCPQRSTLMPAA

SEQ ID NO: 24176 - protein, 70 aa, Synthetic construct
KRKRSQYQRFTYLPANVPIIKTEPTDDYEPAPTCGPVSQGLSPLPRPYYSQQLAMPPDPSPQRSTLMPAA

SEQ ID NO: 24177 - protein, 70 aa, Synthetic construct
KRKRSQYQRFTYLPANVPIIKTEPTDDYEPAPTCGPVSQGLSPLPRPYYSQQLAMPPDPSSCLVALMPAA

SEQ ID NO: 24178 - protein, 70 aa, Synthetic construct
KRKRSQYQRFTYLPANVPIIKTEPTDDYEPAPTCGPVSQGLSPLPRPYYSQQLAMPPDPSSCLVAGFPPC

SEQ ID NO: 24179 - protein, 70 aa, Synthetic construct
PELGAALGIYQSYPGYLPYSPEPPSLYGALNPQYEFKEAAGSFTSSLAQPGAYYPYERTLGQYQYERYGA

SEQ ID NO: 24180 - protein, 70 aa, Synthetic construct
PELGAALGIYGAPYAYLPYSPEPPSLYGALNPQYEFKEAAGSFTSSLAQPGAYYPYERTLGQYQYERYGA

SEQ ID NO: 24181 - protein, 70 aa, Synthetic construct
PELGAALGIYGAPYAAAAAAQSYPGYLPYSNPQYEFKEAAGSFTSSLAQPGAYYPYERTLGQYQYERYGA

SEQ ID NO: 24182 - protein, 70 aa, Synthetic construct
PELGAALGIYGAPYAAAAAAQSYPGYLPYSPEPPSLYGALGSFTSSLAQPGAYYPYERTLGQYQYERYGA

SEQ ID NO: 24183 - protein, 70 aa, Synthetic construct
PELGAALGIYGAPYAAAAAAQSYPGYLPYSPEPPSLYGALNPQYESLAQPGAYYPYERTLGQYQYERYGA

SEQ ID NO: 24184 - protein, 70 aa, Synthetic construct
PELGAALGIYGAPYAAAAAAQSYPGYLPYSPEPPSLYGALNPQYEFKEAAGAYYPYERTLGQYQYERYGA

SEQ ID NO: 24185 - protein, 70 aa, Synthetic construct
PELGAALGIYGAPYAAAAAAQSYPGYLPYSPEPPSLYGALNPQYEFKEAAGSFTSYERTLGQYQYERYGA

SEQ ID NO: 24186 - protein, 70 aa, Synthetic construct
PELGAALGIYGAPYAAAAAAQSYPGYLPYSPEPPSLYGALNPQYEFKEAAGSFTSSLAQPGAYYPYERTL

SEQ ID NO: 24187 - protein, 70 aa, Synthetic construct
VELSGAGRRKKAWLNEHRKNPYPTKGEKIMLAIITKMTLTQVSTWFANARRRLKKENKMTWAPKNKGGEE

SEQ ID NO: 24188 - protein, 70 aa, Synthetic construct
VELSGAGRRKNATRETTSTLKAWLNGEKIMLAIITKMTLTQVSTWFANARRRLKKENKMTWAPKNKGGEE

SEQ ID NO: 24189 - protein, 70 aa, Synthetic construct
VELSGAGRRKNATRETTSTLKAWLNEHRKNPYPTKKMTLTQVSTWFANARRRLKKENKMTWAPKNKGGEE

SEQ ID NO: 24190 - protein, 70 aa, Synthetic construct
VELSGAGRRKNATRETTSTLKAWLNEHRKNPYPTKGEKIMLAIITKMTLTQVSTWFANARWAPKNKGGEE

SEQ ID NO: 24191 - protein, 70 aa, Synthetic construct
DDSSDNCVIVGFVKPLAERTPELVELSSDSEDLGSEQEQSYSSGDSDVSRCSSPHSVLGKDEQINKGHCD

SEQ ID NO: 24192 - protein, 70 aa, Synthetic construct
DDSSDNCVIVGFVKPLAERTPELVELSSDSEDLGSYEKMEYSSGDSDVSRCSSPHSVLGKDEQINKGHCD

SEQ ID NO: 24193 - protein, 70 aa, Synthetic construct
DDSSDNCVIVGFVKPLAERTPELVELSSDSEDLGSYEKMETVKTQSDVSRCSSPHSVLGKDEQINKGHCD

SEQ ID NO: 24194 - protein, 70 aa, Synthetic construct
DDSSDNCVIVGFVKPLAERTPELVELSSDSEDLGSYEKMETVKTQEQEQSCSSPHSVLGKDEQINKGHCD

SEQ ID NO: 24195 - protein, 70 aa, Synthetic construct
DDSSDNCVIVGFVKPLAERTPELVELSSDSEDLGSYEKMETVKTQEQEQSYSSGDSVLGKDEQINKGHCD

SEQ ID NO: 24196 - protein, 70 aa, Synthetic construct
DDSSDNCVIVGFVKPLAERTPELVELSSDSEDLGSYEKMETVKTQEQEQSYSSGDSDVSRDEQINKGHCD

SEQ ID NO: 24197 - protein, 70 aa, Synthetic construct
DDSSDNCVIVGFVKPLAERTPELVELSSDSEDLGSYEKMETVKTQEQEQSYSSGDSDVSRCSSPHKGHCD

SEQ ID NO: 24198 - protein, 70 aa, Synthetic construct
DDSSDNCVIVGFVKPLAERTPELVELSSDSEDLGSYEKMETVKTQEQEQSYSSGDSDVSRCSSPHSVLGK

SEQ ID NO: 24199 - protein, 70 aa, Synthetic construct
LPVAQTEPSIWTVDDVWAFIHSLPGCQDIADEFRAQEIDGQALLLLKEDHLMSAMNIKLGPALKICARIN

SEQ ID NO: 24200 - protein, 70 aa, Synthetic construct
IRKMPTEPSIWTVDDVWAFIHSLPGCQDIADEFRAQEIDGQALLLLKEDHLMSAMNIKLGPALKICARIN

SEQ ID NO: 24201 - protein, 70 aa, Synthetic construct
IRKMPENSDLWTVDDVWAFIHSLPGCQDIADEFRAQEIDGQALLLLKEDHLMSAMNIKLGPALKICARIN

SEQ ID NO: 24202 - protein, 70 aa, Synthetic construct
IRKMPENSDLLPVAQVWAFIHSLPGCQDIADEFRAQEIDGQALLLLKEDHLMSAMNIKLGPALKICARIN

SEQ ID NO: 24203 - protein, 70 aa, Synthetic construct
IRKMPENSDLLPVAQTEPSIWTVDDVWAFIHSLPGCQDIADEFRAQEIDGQALLLLKEDHLMSAMNIKLG

SEQ ID NO: 24204 - protein, 70 aa, Synthetic construct
EAQLALIRDIRRRGKNKVAAQNCRKQDLDHLKDEKEKLLKEKGENDKSLHLLKKQLSTLYLEVFSMLRDE

SEQ ID NO: 24205 - protein, 70 aa, Synthetic construct
EAQLALIRDIRRRGKNKVAAQNCRKRKLENIVELEQDLDHLKDEKEKLLKLLKKQLSTLYLEVFSMLRDE

SEQ ID NO: 24206 - protein, 70 aa, Synthetic construct
GGGGGGGGGAGGGGPSASNSLLYTGDLEALQRLQAGNVVLPLVHRVTGTLAATSTAAQRVYTTGTIRYAP

SEQ ID NO: 24207 - protein, 70 aa, Synthetic construct
SPRDKHPGNGGGGGPSASNSLLYTGDLEALQRLQAGNVVLPLVHRVTGTLAATSTAAQRVYTTGTIRYAP

SEQ ID NO: 24208 - protein, 70 aa, Synthetic construct
SPRDKHPGNGGGGGGSASNSLLYTGDLEALQRLQAGNVVLPLVHRVTGTLAATSTAAQRVYTTGTIRYAP

SEQ ID NO: 24209 - protein, 70 aa, Synthetic construct
SPRDKHPGNGGGGGGGGGGALLYTGDLEALQRLQAGNVVLPLVHRVTGTLAATSTAAQRVYTTGTIRYAP

SEQ ID NO: 24210 - protein, 70 aa, Synthetic construct
SPRDKHPGNGGGGGGGGGGAGGGGPSASNSLLYTGGNVVLPLVHRVTGTLAATSTAAQRVYTTGTIRYAP

SEQ ID NO: 24211 - protein, 70 aa, Synthetic construct
SPRDKHPGNGGGGGGGGGGAGGGGPSASNSLLYTGDLEALQRLQAGNVVLPLVHRAAQRVYTTGTIRYAP

SEQ ID NO: 24212 - protein, 70 aa, Synthetic construct
GPLTFMDVAIEFSLENLYRNVMLENYRNLVFLGIAVSNLDLITCLEQGKEPWNMKRHEMAAKPPAMCSHF

SEQ ID NO: 24213 - protein, 70 aa, Synthetic construct
GPLTFMDVAIEFSLEEWQCLDTAQQYRNLVFLGIAVSNLDLITCLEQGKEPWNMKRHEMAAKPPAMCSHF

SEQ ID NO: 24214 - protein, 70 aa, Synthetic construct
GPLTFMDVAIEFSLEEWQCLDTAQQNLYRNVMLENVSNLDLITCLEQGKEPWNMKRHEMAAKPPAMCSHF

SEQ ID NO: 24215 - protein, 70 aa, Synthetic construct
GPLTFMDVAIEFSLEEWQCLDTAQQNLYRNVMLENYRNLVLITCLEQGKEPWNMKRHEMAAKPPAMCSHF

SEQ ID NO: 24216 - protein, 70 aa, Synthetic construct
GPLTFMDVAIEFSLEEWQCLDTAQQNLYRNVMLENYRNLVFLGIAEQGKEPWNMKRHEMAAKPPAMCSHF

SEQ ID NO: 24217 - protein, 70 aa, Synthetic construct
GPLTFMDVAIEFSLEEWQCLDTAQQNLYRNVMLENYRNLVFLGIAVSNLDPWNMKRHEMAAKPPAMCSHF

SEQ ID NO: 24218 - protein, 70 aa, Synthetic construct
GPLTFMDVAIEFSLEEWQCLDTAQQNLYRNVMLENYRNLVFLGIAVSNLDLITCLRHEMAAKPPAMCSHF

SEQ ID NO: 24219 - protein, 70 aa, Synthetic construct
GPLTFMDVAIEFSLEEWQCLDTAQQNLYRNVMLENYRNLVFLGIAVSNLDLITCLEQGKEAKPPAMCSHF

SEQ ID NO: 24220 - protein, 70 aa, Synthetic construct
GPLTFMDVAIEFSLEEWQCLDTAQQNLYRNVMLENYRNLVFLGIAVSNLDLITCLEQGKEPWNMKMCSHF

SEQ ID NO: 24221 - protein, 70 aa, Synthetic construct
GPLTFMDVAIEFSLEEWQCLDTAQQNLYRNVMLENYRNLVFLGIAVSNLDLITCLEQGKEPWNMKRHEMA

SEQ ID NO: 24222 - protein, 70 aa, Synthetic construct
DLKMPAFHPKQEVPVPGDGVEFPSSTGAEGQTGHPAEKLSDLHNKEHSGGGKRALAPDLMPLDLSARSTR

SEQ ID NO: 24223 - protein, 70 aa, Synthetic construct
RRQEQAFHPKQEVPVPGDGVEFPSSTGAEGQTGHPAEKLSDLHNKEHSGGGKRALAPDLMPLDLSARSTR

SEQ ID NO: 24224 - protein, 70 aa, Synthetic construct
RRQEQHRFSMDLKMPAFHPKQEVPVTGAEGQTGHPAEKLSDLHNKEHSGGGKRALAPDLMPLDLSARSTR

SEQ ID NO: 24225 - protein, 70 aa, Synthetic construct
RRQEQHRFSMDLKMPAFHPKQEVPVPGDGVQTGHPAEKLSDLHNKEHSGGGKRALAPDLMPLDLSARSTR

SEQ ID NO: 24226 - protein, 70 aa, Synthetic construct
RRQEQHRFSMDLKMPAFHPKQEVPVPGDGVEFPSSAEKLSDLHNKEHSGGGKRALAPDLMPLDLSARSTR

SEQ ID NO: 24227 - protein, 70 aa, Synthetic construct
RRQEQHRFSMDLKMPAFHPKQEVPVPGDGVEFPSSTGAEGDLHNKEHSGGGKRALAPDLMPLDLSARSTR

SEQ ID NO: 24228 - protein, 70 aa, Synthetic construct
RRQEQHRFSMDLKMPAFHPKQEVPVPGDGVEFPSSTGAEGQTGHPEHSGGGKRALAPDLMPLDLSARSTR

SEQ ID NO: 24229 - protein, 70 aa, Synthetic construct
RRQEQHRFSMDLKMPAFHPKQEVPVPGDGVEFPSSTGAEGQTGHPAEKLSGKRALAPDLMPLDLSARSTR

SEQ ID NO: 24230 - protein, 70 aa, Synthetic construct
RRQEQHRFSMDLKMPAFHPKQEVPVPGDGVEFPSSTGAEGQTGHPAEKLSDLHNKAPDLMPLDLSARSTR

SEQ ID NO: 24231 - protein, 70 aa, Synthetic construct
RRQEQHRFSMDLKMPAFHPKQEVPVPGDGVEFPSSTGAEGQTGHPAEKLSDLHNKEHSGGPLDLSARSTR

SEQ ID NO: 24232 - protein, 70 aa, Synthetic construct
GKRALAPDLMPLDLSARSTRDDPSNKETASSLQAALVVHPCPYCSHKTYYPEVLWMHKRIWHRVSCNSVA

SEQ ID NO: 24233 - protein, 70 aa, Synthetic construct
DLHNKAPDLMPLDLSARSTRDDPSNKETASSLQAALVVHPCPYCSHKTYYPEVLWMHKRIWHRVSCNSVA

SEQ ID NO: 24234 - protein, 70 aa, Synthetic construct
DLHNKEHSGGPLDLSARSTRDDPSNKETASSLQAALVVHPCPYCSHKTYYPEVLWMHKRIWHRVSCNSVA

SEQ ID NO: 24235 - protein, 70 aa, Synthetic construct
DLHNKEHSGGGKRALAPDLMPLDLSARSTRSLQAALVVHPCPYCSHKTYYPEVLWMHKRIWHRVSCNSVA

SEQ ID NO: 24236 - protein, 70 aa, Synthetic construct
DLHNKEHSGGGKRALAPDLMPLDLSARSTRDDPSNLVVHPCPYCSHKTYYPEVLWMHKRIWHRVSCNSVA

SEQ ID NO: 24237 - protein, 70 aa, Synthetic construct
DLHNKEHSGGGKRALAPDLMPLDLSARSTRDDPSNKETASCPYCSHKTYYPEVLWMHKRIWHRVSCNSVA

SEQ ID NO: 24238 - protein, 70 aa, Synthetic construct
DLHNKEHSGGGKRALAPDLMPLDLSARSTRDDPSNKETASSLQAALVVHPCPYCSMHKRIWHRVSCNSVA

SEQ ID NO: 24239 - protein, 70 aa, Synthetic construct
DLHNKEHSGGGKRALAPDLMPLDLSARSTRDDPSNKETASSLQAALVVHPCPYCSHKTYYWHRVSCNSVA

SEQ ID NO: 24240 - protein, 70 aa, Synthetic construct
DLHNKEHSGGGKRALAPDLMPLDLSARSTRDDPSNKETASSLQAALVVHPCPYCSHKTYYPEVLWCNSVA

SEQ ID NO: 24241 - protein, 70 aa, Synthetic construct
DLHNKEHSGGGKRALAPDLMPLDLSARSTRDDPSNKETASSLQAALVVHPCPYCSHKTYYPEVLWMHKRI

SEQ ID NO: 24242 - protein, 70 aa, Synthetic construct
PPWIQPNGYKSIRSNLVFLSRSGRTGPPPALGGKECQPLLLARFTRTQVPGGMPGSKSGSSPLGVVTKAA

SEQ ID NO: 24243 - protein, 70 aa, Synthetic construct
WHRVSPNGYKSIRSNLVFLSRSGRTGPPPALGGKECQPLLLARFTRTQVPGGMPGSKSGSSPLGVVTKAA

SEQ ID NO: 24244 - protein, 70 aa, Synthetic construct
WHRVSCNSVASIRSNLVFLSRSGRTGPPPALGGKECQPLLLARFTRTQVPGGMPGSKSGSSPLGVVTKAA

SEQ ID NO: 24245 - protein, 70 aa, Synthetic construct
WHRVSCNSVAPPWIQPNGYKSIRSNLVFLSRSGRTGPPPALGGKECQPLLLARFTRTQVPSPLGVVTKAA

SEQ ID NO: 24246 - protein, 70 aa, Synthetic construct
WHRVSCNSVAPPWIQPNGYKSIRSNLVFLSRSGRTGPPPALGGKECQPLLLARFTRTQVPGGMPGVTKAA

SEQ ID NO: 24247 - protein, 70 aa, Synthetic construct
WHRVSCNSVAPPWIQPNGYKSIRSNLVFLSRSGRTGPPPALGGKECQPLLLARFTRTQVPGGMPGSKSGS

SEQ ID NO: 24248 - protein, 70 aa, Synthetic construct
SNPLKWSVADVVRFIRSTDCAPLARIFLDQEIDGQALLLLTLPTVQECMDLKLGPAIKLCHHIERIKFAF

SEQ ID NO: 24249 - protein, 70 aa, Synthetic construct
IEVAEWSVADVVRFIRSTDCAPLARIFLDQEIDGQALLLLTLPTVQECMDLKLGPAIKLCHHIERIKFAF

SEQ ID NO: 24250 - protein, 70 aa, Synthetic construct
IEVAERLHLDVVRFIRSTDCAPLARIFLDQEIDGQALLLLTLPTVQECMDLKLGPAIKLCHHIERIKFAF

SEQ ID NO: 24251 - protein, 70 aa, Synthetic construct
PSQPNSTKNQSLPKASPVTTSPTAATTQNPVLSKLLMADQDSPLDLTVRKSQSEPSEQDGVLDLSTKKSP

SEQ ID NO: 24252 - protein, 70 aa, Synthetic construct
YTSKNSTKNQSLPKASPVTTSPTAATTQNPVLSKLLMADQDSPLDLTVRKSQSEPSEQDGVLDLSTKKSP

SEQ ID NO: 24253 - protein, 70 aa, Synthetic construct
YTSKNSSTQDSLPKASPVTTSPTAATTQNPVLSKLLMADQDSPLDLTVRKSQSEPSEQDGVLDLSTKKSP

SEQ ID NO: 24254 - protein, 70 aa, Synthetic construct
YTSKNSSTQDPSQPNSPVTTSPTAATTQNPVLSKLLMADQDSPLDLTVRKSQSEPSEQDGVLDLSTKKSP

SEQ ID NO: 24255 - protein, 70 aa, Synthetic construct
YTSKNSSTQDPSQPNSTKNQSPTAATTQNPVLSKLLMADQDSPLDLTVRKSQSEPSEQDGVLDLSTKKSP

SEQ ID NO: 24256 - protein, 70 aa, Synthetic construct
YTSKNSSTQDPSQPNSTKNQSLPKATTQNPVLSKLLMADQDSPLDLTVRKSQSEPSEQDGVLDLSTKKSP

SEQ ID NO: 24257 - protein, 70 aa, Synthetic construct
YTSKNSSTQDPSQPNSTKNQSLPKASPVTTVLSKLLMADQDSPLDLTVRKSQSEPSEQDGVLDLSTKKSP

SEQ ID NO: 24258 - protein, 70 aa, Synthetic construct
YTSKNSSTQDPSQPNSTKNQSLPKASPVTTSPTAALMADQDSPLDLTVRKSQSEPSEQDGVLDLSTKKSP

SEQ ID NO: 24259 - protein, 70 aa, Synthetic construct
YTSKNSSTQDPSQPNSTKNQSLPKASPVTTSPTAATTQNPDSPLDLTVRKSQSEPSEQDGVLDLSTKKSP

SEQ ID NO: 24260 - protein, 70 aa, Synthetic construct
YTSKNSSTQDPSQPNSTKNQSLPKASPVTTSPTAATTQNPVLSKLLMADQDSPLDLTVRKVLDLSTKKSP

SEQ ID NO: 24261 - protein, 70 aa, Synthetic construct
YTSKNSSTQDPSQPNSTKNQSLPKASPVTTSPTAATTQNPVLSKLLMADQDSPLDLTVRKSQSEPTKKSP

SEQ ID NO: 24262 - protein, 70 aa, Synthetic construct
TKMISTSIKTARKSKRASGLRINDYDNQCDVVYISQPITECHFENQKSILSSRKTARKSTRGYFFNGDCC

SEQ ID NO: 24263 - protein, 70 aa, Synthetic construct
VHKAATSIKTARKSKRASGLRINDYDNQCDVVYISQPITECHFENQKSILSSRKTARKSTRGYFFNGDCC

SEQ ID NO: 24264 - protein, 70 aa, Synthetic construct
VHKAANGHSRARKSKRASGLRINDYDNQCDVVYISQPITECHFENQKSILSSRKTARKSTRGYFFNGDCC

SEQ ID NO: 24265 - protein, 70 aa, Synthetic construct
VHKAANGHSRTKMISRASGLRINDYDNQCDVVYISQPITECHFENQKSILSSRKTARKSTRGYFFNGDCC

SEQ ID NO: 24266 - protein, 70 aa, Synthetic construct
VHKAANGHSRTKMISTSIKTRINDYDNQCDVVYISQPITECHFENQKSILSSRKTARKSTRGYFFNGDCC

SEQ ID NO: 24267 - protein, 70 aa, Synthetic construct
VHKAANGHSRTKMISTSIKTARKSKDNQCDVVYISQPITECHFENQKSILSSRKTARKSTRGYFFNGDCC

SEQ ID NO: 24268 - protein, 70 aa, Synthetic construct
VHKAANGHSRTKMISTSIKTARKSKRASGLVVYISQPITECHFENQKSILSSRKTARKSTRGYFFNGDCC

SEQ ID NO: 24269 - protein, 70 aa, Synthetic construct
VHKAANGHSRTKMISTSIKTARKSKRASGLRINDYQPITECHFENQKSILSSRKTARKSTRGYFFNGDCC

SEQ ID NO: 24270 - protein, 70 aa, Synthetic construct
VHKAANGHSRTKMISTSIKTARKSKRASGLRINDYDNQCDCHFENQKSILSSRKTARKSTRGYFFNGDCC

SEQ ID NO: 24271 - protein, 70 aa, Synthetic construct
VHKAANGHSRTKMISTSIKTARKSKRASGLRINDYDNQCDVVYISQKSILSSRKTARKSTRGYFFNGDCC

SEQ ID NO: 24272 - protein, 70 aa, Synthetic construct
VHKAANGHSRTKMISTSIKTARKSKRASGLRINDYDNQCDVVYISQPITESSRKTARKSTRGYFFNGDCC

SEQ ID NO: 24273 - protein, 70 aa, Synthetic construct
VHKAANGHSRTKMISTSIKTARKSKRASGLRINDYDNQCDVVYISQPITECHFENARKSTRGYFFNGDCC

SEQ ID NO: 24274 - protein, 70 aa, Synthetic construct
VHKAANGHSRTKMISTSIKTARKSKRASGLRINDYDNQCDVVYISQPITECHFENQKSILRGYFFNGDCC

SEQ ID NO: 24275 - protein, 70 aa, Synthetic construct
VHKAANGHSRTKMISTSIKTARKSKRASGLRINDYDNQCDVVYISQPITECHFENQKSILSSRKTARKST

SEQ ID NO: 24276 - protein, 70 aa, Synthetic construct
LESAAEVGFVRFFQGMPEKPTTTVRLFDRGDFYTAHGEDALLAAREVFKTQGVIKYMGPAGAKNLQSVVL

SEQ ID NO: 24277 - protein, 70 aa, Synthetic construct
MAVQPEVGFVRFFQGMPEKPTTTVRLFDRGDFYTAHGEDALLAAREVFKTQGVIKYMGPAGAKNLQSVVL

SEQ ID NO: 24278 - protein, 70 aa, Synthetic construct
MAVQPKETLQRFFQGMPEKPTTTVRLFDRGDFYTAHGEDALLAAREVFKTQGVIKYMGPAGAKNLQSVVL

SEQ ID NO: 24279 - protein, 70 aa, Synthetic construct
MAVQPKETLQLESAAMPEKPTTTVRLFDRGDFYTAHGEDALLAAREVFKTQGVIKYMGPAGAKNLQSVVL

SEQ ID NO: 24280 - protein, 70 aa, Synthetic construct
MAVQPKETLQLESAAEVGFVTTTVRLFDRGDFYTAHGEDALLAAREVFKTQGVIKYMGPAGAKNLQSVVL

SEQ ID NO: 24281 - protein, 70 aa, Synthetic construct
MAVQPKETLQLESAAEVGFVRFFQGMPEKPDFYTAHGEDALLAAREVFKTQGVIKYMGPAGAKNLQSVVL

SEQ ID NO: 24282 - protein, 70 aa, Synthetic construct
MAVQPKETLQLESAAEVGFVRFFQGMPEKPTTTVRHGEDALLAAREVFKTQGVIKYMGPAGAKNLQSVVL

SEQ ID NO: 24283 - protein, 70 aa, Synthetic construct
MAVQPKETLQLESAAEVGFVRFFQGMPEKPTTTVRLFDRGLLAAREVFKTQGVIKYMGPAGAKNLQSVVL

SEQ ID NO: 24284 - protein, 70 aa, Synthetic construct
MAVQPKETLQLESAAEVGFVRFFQGMPEKPTTTVRLFDRGDFYTAEVFKTQGVIKYMGPAGAKNLQSVVL

SEQ ID NO: 24285 - protein, 70 aa, Synthetic construct
MAVQPKETLQLESAAEVGFVRFFQGMPEKPTTTVRLFDRGDFYTAHGEDAQGVIKYMGPAGAKNLQSVVL

SEQ ID NO: 24286 - protein, 70 aa, Synthetic construct
MAVQPKETLQLESAAEVGFVRFFQGMPEKPTTTVRLFDRGDFYTAHGEDALLAAREVFKTQGVIKYMGPA

SEQ ID NO: 24287 - protein, 70 aa, Synthetic construct
ALGNEKQSDTPNPPAVPLQVDSTPKMKMEIGDTLSTAEESSPPKSRVELGKIHFKKHLLHVTSRPLLATT

SEQ ID NO: 24288 - protein, 70 aa, Synthetic construct
KKTLQKQSDTPNPPAVPLQVDSTPKMKMEIGDTLSTAEESSPPKSRVELGKIHFKKHLLHVTSRPLLATT

SEQ ID NO: 24289 - protein, 70 aa, Synthetic construct
KKTLQNRFLTPNPPAVPLQVDSTPKMKMEIGDTLSTAEESSPPKSRVELGKIHFKKHLLHVTSRPLLATT

SEQ ID NO: 24290 - protein, 70 aa, Synthetic construct
KKTLQNRFLTALGNEVPLQVDSTPKMKMEIGDTLSTAEESSPPKSRVELGKIHFKKHLLHVTSRPLLATT

SEQ ID NO: 24291 - protein, 70 aa, Synthetic construct
KKTLQNRFLTALGNEKQSDTDSTPKMKMEIGDTLSTAEESSPPKSRVELGKIHFKKHLLHVTSRPLLATT

SEQ ID NO: 24292 - protein, 70 aa, Synthetic construct
KKTLQNRFLTALGNEKQSDTPNPPAMKMEIGDTLSTAEESSPPKSRVELGKIHFKKHLLHVTSRPLLATT

SEQ ID NO: 24293 - protein, 70 aa, Synthetic construct
KKTLQNRFLTALGNEKQSDTPNPPAVPLQVGDTLSTAEESSPPKSRVELGKIHFKKHLLHVTSRPLLATT

SEQ ID NO: 24294 - protein, 70 aa, Synthetic construct
KKTLQNRFLTALGNEKQSDTPNPPAVPLQVDSTPKTAEESSPPKSRVELGKIHFKKHLLHVTSRPLLATT

SEQ ID NO: 24295 - protein, 70 aa, Synthetic construct
KKTLQNRFLTALGNEKQSDTPNPPAVPLQVDSTPKMKMEISPPKSRVELGKIHFKKHLLHVTSRPLLATT

SEQ ID NO: 24296 - protein, 70 aa, Synthetic construct
KKTLQNRFLTALGNEKQSDTPNPPAVPLQVDSTPKMKMEIGDTLSRVELGKIHFKKHLLHVTSRPLLATT

SEQ ID NO: 24297 - protein, 70 aa, Synthetic construct
KKTLQNRFLTALGNEKQSDTPNPPAVPLQVDSTPKMKMEIGDTLSTAEESSPPKSRVELGKIHFKKHLLH

SEQ ID NO: 24298 - protein, 70 aa, Synthetic construct
GLLKRKQRRYRTTFTSYQLEELERAFQKTHYPDVFTREELAMRLDLTEARVQVWFQNRRAKWRKRGLPFP

SEQ ID NO: 24299 - protein, 70 aa, Synthetic construct
GLLKRKQRRYRTTFTSYQLEELERAFQKTHYPDVFTREELAMRLDLTEARVQVWFQNRRAKWRKREKAGA

SEQ ID NO: 24300 - protein, 70 aa, Synthetic construct
YFSRFGTKCARCGRQIYASDWVRRARGNAYKRQLSTGEEFGLVEEKVLCRIHYDTMIENLKRAAENGNGL

SEQ ID NO: 24301 - protein, 70 aa, Synthetic construct
AQIQMQLQHELQQQAAFFQPQFLNPAFLPHFPMTPEALLQFQQPQFLFPFYIPGTEFSLGPDLGLPGSAT

SEQ ID NO: 24302 - protein, 70 aa, Synthetic construct
QPAHHQLQHELQQQAAFFQPQFLNPAFLPHFPMTPEALLQFQQPQFLFPFYIPGTEFSLGPDLGLPGSAT

SEQ ID NO: 24303 - protein, 70 aa, Synthetic construct
QPAHHPPQSPLQQQAAFFQPQFLNPAFLPHFPMTPEALLQFQQPQFLFPFYIPGTEFSLGPDLGLPGSAT

SEQ ID NO: 24304 - protein, 70 aa, Synthetic construct
QPAHHPPQSPAQIQMAFFQPQFLNPAFLPHFPMTPEALLQFQQPQFLFPFYIPGTEFSLGPDLGLPGSAT

SEQ ID NO: 24305 - protein, 70 aa, Synthetic construct
QPAHHPPQSPAQIQMQLQHEQFLNPAFLPHFPMTPEALLQFQQPQFLFPFYIPGTEFSLGPDLGLPGSAT

SEQ ID NO: 24306 - protein, 70 aa, Synthetic construct
QPAHHPPQSPAQIQMQLQHELQQQAAFLPHFPMTPEALLQFQQPQFLFPFYIPGTEFSLGPDLGLPGSAT

SEQ ID NO: 24307 - protein, 70 aa, Synthetic construct
QPAHHPPQSPAQIQMQLQHELQQQAAFFQPFPMTPEALLQFQQPQFLFPFYIPGTEFSLGPDLGLPGSAT

SEQ ID NO: 24308 - protein, 70 aa, Synthetic construct
QPAHHPPQSPAQIQMQLQHELQQQAAFFQPQFLNPEALLQFQQPQFLFPFYIPGTEFSLGPDLGLPGSAT

SEQ ID NO: 24309 - protein, 70 aa, Synthetic construct
QPAHHPPQSPAQIQMQLQHELQQQAAFFQPQFLNPAFLPHFQQPQFLFPFYIPGTEFSLGPDLGLPGSAT

SEQ ID NO: 24310 - protein, 70 aa, Synthetic construct
QPAHHPPQSPAQIQMQLQHELQQQAAFFQPQFLNPAFLPHFPMTPFLFPFYIPGTEFSLGPDLGLPGSAT

SEQ ID NO: 24311 - protein, 70 aa, Synthetic construct
QPAHHPPQSPAQIQMQLQHELQQQAAFFQPQFLNPAFLPHFPMTPEALLQYIPGTEFSLGPDLGLPGSAT

SEQ ID NO: 24312 - protein, 70 aa, Synthetic construct
QPAHHPPQSPAQIQMQLQHELQQQAAFFQPQFLNPAFLPHFPMTPEALLQFQQPQFLFPFPDLGLPGSAT

SEQ ID NO: 24313 - protein, 70 aa, Synthetic construct
QPAHHPPQSPAQIQMQLQHELQQQAAFFQPQFLNPAFLPHFPMTPEALLQFQQPQFLFPFYIPGTPGSAT

SEQ ID NO: 24314 - protein, 70 aa, Synthetic construct
QPAHHPPQSPAQIQMQLQHELQQQAAFFQPQFLNPAFLPHFPMTPEALLQFQQPQFLFPFYIPGTEFSLG

SEQ ID NO: 24315 - protein, 70 aa, Synthetic construct
QYQCDQCTVAFPTLELWQEHQHMHFLAAQNQFLHSPFLERPMDMPYMIFDPNNPLMTGQLLGSSLTQMPP

SEQ ID NO: 24316 - protein, 70 aa, Synthetic construct
LQNSLQCTVAFPTLELWQEHQHMHFLAAQNQFLHSPFLERPMDMPYMIFDPNNPLMTGQLLGSSLTQMPP

SEQ ID NO: 24317 - protein, 70 aa, Synthetic construct
LQNSLPPQLLFPTLELWQEHQHMHFLAAQNQFLHSPFLERPMDMPYMIFDPNNPLMTGQLLGSSLTQMPP

SEQ ID NO: 24318 - protein, 70 aa, Synthetic construct
LQNSLPPQLLQYQCDLWQEHQHMHFLAAQNQFLHSPFLERPMDMPYMIFDPNNPLMTGQLLGSSLTQMPP

SEQ ID NO: 24319 - protein, 70 aa, Synthetic construct
LQNSLPPQLLQYQCDQCTVAQHMHFLAAQNQFLHSPFLERPMDMPYMIFDPNNPLMTGQLLGSSLTQMPP

SEQ ID NO: 24320 - protein, 70 aa, Synthetic construct
LQNSLPPQLLQYQCDQCTVAFPTLELAAQNQFLHSPFLERPMDMPYMIFDPNNPLMTGQLLGSSLTQMPP

SEQ ID NO: 24321 - protein, 70 aa, Synthetic construct
LQNSLPPQLLQYQCDQCTVAFPTLELWQEHQFLHSPFLERPMDMPYMIFDPNNPLMTGQLLGSSLTQMPP

SEQ ID NO: 24322 - protein, 70 aa, Synthetic construct
LQNSLPPQLLQYQCDQCTVAFPTLELWQEHQHMHFLAAQNPMDMPYMIFDPNNPLMTGQLLGSSLTQMPP

SEQ ID NO: 24323 - protein, 70 aa, Synthetic construct
LQNSLPPQLLQYQCDQCTVAFPTLELWQEHQHMHFLAAQNQFLHSYMIFDPNNPLMTGQLLGSSLTQMPP

SEQ ID NO: 24324 - protein, 70 aa, Synthetic construct
LQNSLPPQLLQYQCDQCTVAFPTLELWQEHQHMHFLAAQNQFLHSPFLERPMDMPYMIFDLGSSLTQMPP

SEQ ID NO: 24325 - protein, 70 aa, Synthetic construct
LQNSLPPQLLQYQCDQCTVAFPTLELWQEHQHMHFLAAQNQFLHSPFLERPMDMPYMIFDPNNPLTQMPP

SEQ ID NO: 24326 - protein, 70 aa, Synthetic construct
LQNSLPPQLLQYQCDQCTVAFPTLELWQEHQHMHFLAAQNQFLHSPFLERPMDMPYMIFDPNNPLMTGQL

SEQ ID NO: 24327 - protein, 70 aa, Synthetic construct
DSVVFEDVDVNFTQEEWALLDPSQKNLYRDVMQETFRNLAIEDEYKNPRRNLRGLMGERLLESKKDHQHG

SEQ ID NO: 24328 - protein, 70 aa, Synthetic construct
DSVVFEDVDVNFTQEEWALLDPSQKNLYRDVMQETFRNLASVGKKKNPRRNLRGLMGERLLESKKDHQHG

SEQ ID NO: 24329 - protein, 70 aa, Synthetic construct
DSVVFEDVDVNFTQEEWALLDPSQKNLYRDVMQETFRNLASVGKKWKDQKNLRGLMGERLLESKKDHQHG

SEQ ID NO: 24330 - protein, 70 aa, Synthetic construct
DSVVFEDVDVNFTQEEWALLDPSQKNLYRDVMQETFRNLASVGKKWKDQKIEDEYMGERLLESKKDHQHG

SEQ ID NO: 24331 - protein, 70 aa, Synthetic construct
DSVVFEDVDVNFTQEEWALLDPSQKNLYRDVMQETFRNLASVGKKWKDQKIEDEYKNPRRLESKKDHQHG

SEQ ID NO: 24332 - protein, 70 aa, Synthetic construct
DSVVFEDVDVNFTQEEWALLDPSQKNLYRDVMQETFRNLASVGKKWKDQKIEDEYKNPRRNLRGLDHQHG

SEQ ID NO: 24333 - protein, 70 aa, Synthetic construct
DSVVFEDVDVNFTQEEWALLDPSQKNLYRDVMQETFRNLASVGKKWKDQKIEDEYKNPRRNLRGLMGERL

SEQ ID NO: 24334 - protein, 70 aa, Synthetic construct
LCDECNVAYHIYCLNPPLDKVPEEEYWYCPSCKTDSSEVVKAGERLKMSKKKAKMPSASTESRRDWGRGM

SEQ ID NO: 24335 - protein, 70 aa, Synthetic construct
GGKHEPNMQLLCDECNVAYHVPEEEYWYCPSCKTDSSEVVKAGERLKMSKKKAKMPSASTESRRDWGRGM

SEQ ID NO: 24336 - protein, 70 aa, Synthetic construct
GGKHEPNMQLLCDECNVAYHIYCLNYWYCPSCKTDSSEVVKAGERLKMSKKKAKMPSASTESRRDWGRGM

SEQ ID NO: 24337 - protein, 70 aa, Synthetic construct
GGKHEPNMQLLCDECNVAYHIYCLNPPLDKSCKTDSSEVVKAGERLKMSKKKAKMPSASTESRRDWGRGM

SEQ ID NO: 24338 - protein, 70 aa, Synthetic construct
GGKHEPNMQLLCDECNVAYHIYCLNPPLDKVPEEESSEVVKAGERLKMSKKKAKMPSASTESRRDWGRGM

SEQ ID NO: 24339 - protein, 70 aa, Synthetic construct
GGKHEPNMQLLCDECNVAYHIYCLNPPLDKVPEEEYWYCPKAGERLKMSKKKAKMPSASTESRRDWGRGM

SEQ ID NO: 24340 - protein, 70 aa, Synthetic construct
GGKHEPNMQLLCDECNVAYHIYCLNPPLDKVPEEEYWYCPSCKTDLKMSKKKAKMPSASTESRRDWGRGM

SEQ ID NO: 24341 - protein, 70 aa, Synthetic construct
GGKHEPNMQLLCDECNVAYHIYCLNPPLDKVPEEEYWYCPSCKTDSSEVVKKAKMPSASTESRRDWGRGM

SEQ ID NO: 24342 - protein, 70 aa, Synthetic construct
GGKHEPNMQLLCDECNVAYHIYCLNPPLDKVPEEEYWYCPSCKTDSSEVVKAGERPSASTESRRDWGRGM

SEQ ID NO: 24343 - protein, 70 aa, Synthetic construct
GGKHEPNMQLLCDECNVAYHIYCLNPPLDKVPEEEYWYCPSCKTDSSEVVKAGERLKMSKESRRDWGRGM

SEQ ID NO: 24344 - protein, 70 aa, Synthetic construct
GGKHEPNMQLLCDECNVAYHIYCLNPPLDKVPEEEYWYCPSCKTDSSEVVKAGERLKMSKKKAKMWGRGM

SEQ ID NO: 24345 - protein, 70 aa, Synthetic construct
GGKHEPNMQLLCDECNVAYHIYCLNPPLDKVPEEEYWYCPSCKTDSSEVVKAGERLKMSKKKAKMPSAST

SEQ ID NO: 24346 - protein, 70 aa, Synthetic construct
ADSPADIRIKEEEPDPEEWQLSGDSTLNTNDLTHLRVQVVDEEGDQQHQEGKRLRRVACTCPNCKEGGGR

SEQ ID NO: 24347 - protein, 70 aa, Synthetic construct
AGIQLDIRIKEEEPDPEEWQLSGDSTLNTNDLTHLRVQVVDEEGDQQHQEGKRLRRVACTCPNCKEGGGR

SEQ ID NO: 24348 - protein, 70 aa, Synthetic construct
AGIQLHPGENADSPADIRIKEEEPDTLNTNDLTHLRVQVVDEEGDQQHQEGKRLRRVACTCPNCKEGGGR

SEQ ID NO: 24349 - protein, 70 aa, Synthetic construct
AGIQLHPGENADSPADIRIKEEEPDPEEWQDLTHLRVQVVDEEGDQQHQEGKRLRRVACTCPNCKEGGGR

SEQ ID NO: 24350 - protein, 70 aa, Synthetic construct
AGIQLHPGENADSPADIRIKEEEPDPEEWQLSGDSRVQVVDEEGDQQHQEGKRLRRVACTCPNCKEGGGR

SEQ ID NO: 24351 - protein, 70 aa, Synthetic construct
AGIQLHPGENADSPADIRIKEEEPDPEEWQLSGDSTLNTNDEEGDQQHQEGKRLRRVACTCPNCKEGGGR

SEQ ID NO: 24352 - protein, 70 aa, Synthetic construct
AGIQLHPGENADSPADIRIKEEEPDPEEWQLSGDSTLNTNDLTHLQQHQEGKRLRRVACTCPNCKEGGGR

SEQ ID NO: 24353 - protein, 70 aa, Synthetic construct
AGIQLHPGENADSPADIRIKEEEPDPEEWQLSGDSTLNTNDLTHLRVQVVGKRLRRVACTCPNCKEGGGR

SEQ ID NO: 24354 - protein, 70 aa, Synthetic construct
AGIQLHPGENADSPADIRIKEEEPDPEEWQLSGDSTLNTNDLTHLRVQVVDEEGDRVACTCPNCKEGGGR

SEQ ID NO: 24355 - protein, 70 aa, Synthetic construct
AGIQLHPGENADSPADIRIKEEEPDPEEWQLSGDSTLNTNDLTHLRVQVVDEEGDQQHQECPNCKEGGGR

SEQ ID NO: 24356 - protein, 70 aa, Synthetic construct
AGIQLHPGENADSPADIRIKEEEPDPEEWQLSGDSTLNTNDLTHLRVQVVDEEGDQQHQEGKRLREGGGR

SEQ ID NO: 24357 - protein, 70 aa, Synthetic construct
AGIQLHPGENADSPADIRIKEEEPDPEEWQLSGDSTLNTNDLTHLRVQVVDEEGDQQHQEGKRLRRVACT

SEQ ID NO: 24358 - protein, 70 aa, Synthetic construct
ICHIPGCGKVYGKTSHLRAHLRWHSGERPFVCNWMYCGKRFTRSDELQRHRRTHTGEKKFVCPECSKRFM

SEQ ID NO: 24359 - protein, 70 aa, Synthetic construct
GTNLGGCGKVYGKTSHLRAHLRWHSGERPFVCNWMYCGKRFTRSDELQRHRRTHTGEKKFVCPECSKRFM

SEQ ID NO: 24360 - protein, 70 aa, Synthetic construct
GTNLGKKKQHYGKTSHLRAHLRWHSGERPFVCNWMYCGKRFTRSDELQRHRRTHTGEKKFVCPECSKRFM

SEQ ID NO: 24361 - protein, 70 aa, Synthetic construct
GTNLGKKKQHICHIPHLRAHLRWHSGERPFVCNWMYCGKRFTRSDELQRHRRTHTGEKKFVCPECSKRFM

SEQ ID NO: 24362 - protein, 70 aa, Synthetic construct
GTNLGKKKQHICHIPGCGKVLRWHSGERPFVCNWMYCGKRFTRSDELQRHRRTHTGEKKFVCPECSKRFM

SEQ ID NO: 24363 - protein, 70 aa, Synthetic construct
GTNLGKKKQHICHIPGCGKVYGKTSGERPFVCNWMYCGKRFTRSDELQRHRRTHTGEKKFVCPECSKRFM

SEQ ID NO: 24364 - protein, 70 aa, Synthetic construct
GTNLGKKKQHICHIPGCGKVYGKTSHLRAHVCNWMYCGKRFTRSDELQRHRRTHTGEKKFVCPECSKRFM

SEQ ID NO: 24365 - protein, 70 aa, Synthetic construct
GTNLGKKKQHICHIPGCGKVYGKTSHLRAHLRWHSYCGKRFTRSDELQRHRRTHTGEKKFVCPECSKRFM

SEQ ID NO: 24366 - protein, 70 aa, Synthetic construct
GTNLGKKKQHICHIPGCGKVYGKTSHLRAHLRWHSGERPFFTRSDELQRHRRTHTGEKKFVCPECSKRFM

SEQ ID NO: 24367 - protein, 70 aa, Synthetic construct
GTNLGKKKQHICHIPGCGKVYGKTSHLRAHLRWHSGERPFVCNWMELQRHRRTHTGEKKFVCPECSKRFM

SEQ ID NO: 24368 - protein, 70 aa, Synthetic construct
GTNLGKKKQHICHIPGCGKVYGKTSHLRAHLRWHSGERPFVCNWMYCGKRRRTHTGEKKFVCPECSKRFM

SEQ ID NO: 24369 - protein, 70 aa, Synthetic construct
GTNLGKKKQHICHIPGCGKVYGKTSHLRAHLRWHSGERPFVCNWMYCGKRFTRSDGEKKFVCPECSKRFM

SEQ ID NO: 24370 - protein, 70 aa, Synthetic construct
GTNLGKKKQHICHIPGCGKVYGKTSHLRAHLRWHSGERPFVCNWMYCGKRFTRSDELQRHVCPECSKRFM

SEQ ID NO: 24371 - protein, 70 aa, Synthetic construct
GTNLGKKKQHICHIPGCGKVYGKTSHLRAHLRWHSGERPFVCNWMYCGKRFTRSDELQRHRRTHTGEKKF

SEQ ID NO: 24372 - protein, 70 aa, Synthetic construct
TVSRTGLEKAAAGAVGLERRDWSPSPPATPEQGLSAFYLSYFDMLYPEDSSWAAKAPGASSREEPPEEPE

SEQ ID NO: 24373 - protein, 70 aa, Synthetic construct
SPSHLGLEKAAAGAVGLERRDWSPSPPATPEQGLSAFYLSYFDMLYPEDSSWAAKAPGASSREEPPEEPE

SEQ ID NO: 24374 - protein, 70 aa, Synthetic construct
SPSHLLLPPDAAGAVGLERRDWSPSPPATPEQGLSAFYLSYFDMLYPEDSSWAAKAPGASSREEPPEEPE

SEQ ID NO: 24375 - protein, 70 aa, Synthetic construct
SPSHLLLPPDTVSRTGLERRDWSPSPPATPEQGLSAFYLSYFDMLYPEDSSWAAKAPGASSREEPPEEPE

SEQ ID NO: 24376 - protein, 70 aa, Synthetic construct
SPSHLLLPPDTVSRTGLEKADWSPSPPATPEQGLSAFYLSYFDMLYPEDSSWAAKAPGASSREEPPEEPE

SEQ ID NO: 24377 - protein, 70 aa, Synthetic construct
SPSHLLLPPDTVSRTGLEKAAAGAVPPATPEQGLSAFYLSYFDMLYPEDSSWAAKAPGASSREEPPEEPE

SEQ ID NO: 24378 - protein, 70 aa, Synthetic construct
SPSHLLLPPDTVSRTGLEKAAAGAVGLERREQGLSAFYLSYFDMLYPEDSSWAAKAPGASSREEPPEEPE

SEQ ID NO: 24379 - protein, 70 aa, Synthetic construct
SPSHLLLPPDTVSRTGLEKAAAGAVGLERRDWSPSPPATPEQGLSAFYLSYFDMLAPGASSREEPPEEPE

SEQ ID NO: 24380 - protein, 70 aa, Synthetic construct
SPSHLLLPPDTVSRTGLEKAAAGAVGLERRDWSPSPPATPEQGLSAFYLSYFDMLYPEDSSREEPPEEPE

SEQ ID NO: 24381 - protein, 70 aa, Synthetic construct
SPSHLLLPPDTVSRTGLEKAAAGAVGLERRDWSPSPPATPEQGLSAFYLSYFDMLYPEDSSWAAKPEEPE

SEQ ID NO: 24382 - protein, 70 aa, Synthetic construct
SPSHLLLPPDTVSRTGLEKAAAGAVGLERRDWSPSPPATPEQGLSAFYLSYFDMLYPEDSSWAAKAPGAS

SEQ ID NO: 24383 - protein, 70 aa, Synthetic construct
GPLQFRDVAIEFSLEEWHCLDMAQRNLYRDVMLENYRNLVLITHLEQGKKPSTMQRHEMVANPSVLCSHF

SEQ ID NO: 24384 - protein, 70 aa, Synthetic construct
GPLQFRDVAIEFSLEEWHCLDMAQRNLYRDVMLENYRNLVFLGIVEQGKKPSTMQRHEMVANPSVLCSHF

SEQ ID NO: 24385 - protein, 70 aa, Synthetic construct
GPLQFRDVAIEFSLEEWHCLDMAQRNLYRDVMLENYRNLVFLGIVVSKPDPSTMQRHEMVANPSVLCSHF

SEQ ID NO: 24386 - protein, 70 aa, Synthetic construct
GPLQFRDVAIEFSLEEWHCLDMAQRNLYRDVMLENYRNLVFLGIVVSKPDLITHLRHEMVANPSVLCSHF

SEQ ID NO: 24387 - protein, 70 aa, Synthetic construct
GPLQFRDVAIEFSLEEWHCLDMAQRNLYRDVMLENYRNLVFLGIVVSKPDLITHLEQGKKANPSVLCSHF

SEQ ID NO: 24388 - protein, 70 aa, Synthetic construct
GPLQFRDVAIEFSLEEWHCLDMAQRNLYRDVMLENYRNLVFLGIVVSKPDLITHLEQGKKPSTMQLCSHF

SEQ ID NO: 24389 - protein, 70 aa, Synthetic construct
GPLQFRDVAIEFSLEEWHCLDMAQRNLYRDVMLENYRNLVFLGIVVSKPDLITHLEQGKKPSTMQRHEMV

SEQ ID NO: 24390 - protein, 70 aa, Synthetic construct
PELQPKASQSRKRSLATMDSPPHQKQPQRGEVSQKTVIIKEEEEDTAEKPGKEEDVVTPKPGKRKRDQAE

SEQ ID NO: 24391 - protein, 70 aa, Synthetic construct
VEPAGKASQSRKRSLATMDSPPHQKQPQRGEVSQKTVIIKEEEEDTAEKPGKEEDVVTPKPGKRKRDQAE

SEQ ID NO: 24392 - protein, 70 aa, Synthetic construct
VEPAGRSRFTRKRSLATMDSPPHQKQPQRGEVSQKTVIIKEEEEDTAEKPGKEEDVVTPKPGKRKRDQAE

SEQ ID NO: 24393 - protein, 70 aa, Synthetic construct
VEPAGRSRFTPELQPATMDSPPHQKQPQRGEVSQKTVIIKEEEEDTAEKPGKEEDVVTPKPGKRKRDQAE

SEQ ID NO: 24394 - protein, 70 aa, Synthetic construct
VEPAGRSRFTPELQPKASQSPPHQKQPQRGEVSQKTVIIKEEEEDTAEKPGKEEDVVTPKPGKRKRDQAE

SEQ ID NO: 24395 - protein, 70 aa, Synthetic construct
VEPAGRSRFTPELQPKASQSRKRSLATMDSPPHQKTVIIKEEEEDTAEKPGKEEDVVTPKPGKRKRDQAE

SEQ ID NO: 24396 - protein, 70 aa, Synthetic construct
VEPAGRSRFTPELQPKASQSRKRSLATMDSPPHQKQPQRGEVSQKTVIIKEEEEDVVTPKPGKRKRDQAE

SEQ ID NO: 24397 - protein, 70 aa, Synthetic construct
VEPAGRSRFTPELQPKASQSRKRSLATMDSPPHQKQPQRGEVSQKTVIIKEEEEDTAEKPPGKRKRDQAE

SEQ ID NO: 24398 - protein, 70 aa, Synthetic construct
VEPAGRSRFTPELQPKASQSRKRSLATMDSPPHQKQPQRGEVSQKTVIIKEEEEDTAEKPGKEEDRDQAE

SEQ ID NO: 24399 - protein, 70 aa, Synthetic construct
VEPAGRSRFTPELQPKASQSRKRSLATMDSPPHQKQPQRGEVSQKTVIIKEEEEDTAEKPGKEEDVVTPK

SEQ ID NO: 24400 - protein, 70 aa, Synthetic construct
KNPGGASASARVSSWDSQSYDIEQICLGASNPPWASTLFEIDEFVKIYDLPGEDDTSSLNQYLFPVCLEY

SEQ ID NO: 24401 - protein, 70 aa, Synthetic construct
DHDLRASASARVSSWDSQSYDIEQICLGASNPPWASTLFEIDEFVKIYDLPGEDDTSSLNQYLFPVCLEY

SEQ ID NO: 24402 - protein, 70 aa, Synthetic construct
DHDLREPSGIRVSSWDSQSYDIEQICLGASNPPWASTLFEIDEFVKIYDLPGEDDTSSLNQYLFPVCLEY

SEQ ID NO: 24403 - protein, 70 aa, Synthetic construct
DHDLREPSGIKNPGGDSQSYDIEQICLGASNPPWASTLFEIDEFVKIYDLPGEDDTSSLNQYLFPVCLEY

SEQ ID NO: 24404 - protein, 70 aa, Synthetic construct
DHDLREPSGIKNPGGASASADIEQICLGASNPPWASTLFEIDEFVKIYDLPGEDDTSSLNQYLFPVCLEY

SEQ ID NO: 24405 - protein, 70 aa, Synthetic construct
DHDLREPSGIKNPGGASASARVSSWCLGASNPPWASTLFEIDEFVKIYDLPGEDDTSSLNQYLFPVCLEY

SEQ ID NO: 24406 - protein, 70 aa, Synthetic construct
DHDLREPSGIKNPGGASASARVSSWDSQSYNPPWASTLFEIDEFVKIYDLPGEDDTSSLNQYLFPVCLEY

SEQ ID NO: 24407 - protein, 70 aa, Synthetic construct
DHDLREPSGIKNPGGASASARVSSWDSQSYDIEQISTLFEIDEFVKIYDLPGEDDTSSLNQYLFPVCLEY

SEQ ID NO: 24408 - protein, 70 aa, Synthetic construct
DHDLREPSGIKNPGGASASARVSSWDSQSYDIEQICLGASIDEFVKIYDLPGEDDTSSLNQYLFPVCLEY

SEQ ID NO: 24409 - protein, 70 aa, Synthetic construct
DHDLREPSGIKNPGGASASARVSSWDSQSYDIEQICLGASNPPWASTLFEIDEFVTSSLNQYLFPVCLEY

SEQ ID NO: 24410 - protein, 70 aa, Synthetic construct
DHDLREPSGIKNPGGASASARVSSWDSQSYDIEQICLGASNPPWASTLFEIDEFVKIYDLPGEDDVCLEY

SEQ ID NO: 24411 - protein, 70 aa, Synthetic construct
DHDLREPSGIKNPGGASASARVSSWDSQSYDIEQICLGASNPPWASTLFEIDEFVKIYDLPGEDDTSSLN

SEQ ID NO: 24412 - protein, 70 aa, Synthetic construct
APQEAPAPEGRALGEEEEEPPRAGEGRPAGREEEEEEEEEGTYHCTECEDSFDNLGELHGHFMLHARGEV

SEQ ID NO: 24413 - protein, 70 aa, Synthetic construct
PPCRLPAPEGRALGEEEEEPPRAGEGRPAGREEEEEEEEEGTYHCTECEDSFDNLGELHGHFMLHARGEV

SEQ ID NO: 24414 - protein, 70 aa, Synthetic construct
PPCRLCCPATRALGEEEEEPPRAGEGRPAGREEEEEEEEEGTYHCTECEDSFDNLGELHGHFMLHARGEV

SEQ ID NO: 24415 - protein, 70 aa, Synthetic construct
PPCRLCCPATAPQEAEEEEPPRAGEGRPAGREEEEEEEEEGTYHCTECEDSFDNLGELHGHFMLHARGEV

SEQ ID NO: 24416 - protein, 70 aa, Synthetic construct
PPCRLCCPATAPQEAPAPEGPRAGEGRPAGREEEEEEEEEGTYHCTECEDSFDNLGELHGHFMLHARGEV

SEQ ID NO: 24417 - protein, 70 aa, Synthetic construct
PPCRLCCPATAPQEAPAPEGRALGEGRPAGREEEEEEEEEGTYHCTECEDSFDNLGELHGHFMLHARGEV

SEQ ID NO: 24418 - protein, 70 aa, Synthetic construct
PPCRLCCPATAPQEAPAPEGRALGEEEEEPREEEEEEEEEGTYHCTECEDSFDNLGELHGHFMLHARGEV

SEQ ID NO: 24419 - protein, 70 aa, Synthetic construct
PPCRLCCPATAPQEAPAPEGRALGEEEEEPPRAGEEEEEEGTYHCTECEDSFDNLGELHGHFMLHARGEV

SEQ ID NO: 24420 - protein, 70 aa, Synthetic construct
PPCRLCCPATAPQEAPAPEGRALGEEEEEPPRAGEGRPAGGTYHCTECEDSFDNLGELHGHFMLHARGEV

SEQ ID NO: 24421 - protein, 70 aa, Synthetic construct
IKRDKDGNVTQETKKMEMKGEPKDKVEKIGLVEDLNKGAKPVVVLQKLSLDDVQKLIKDREDKSRSSLKP

SEQ ID NO: 24422 - protein, 70 aa, Synthetic construct
GALKNDGNVTQETKKMEMKGEPKDKVEKIGLVEDLNKGAKPVVVLQKLSLDDVQKLIKDREDKSRSSLKP

SEQ ID NO: 24423 - protein, 70 aa, Synthetic construct
GALKNFVIPKIKRDKMEMKGEPKDKVEKIGLVEDLNKGAKPVVVLQKLSLDDVQKLIKDREDKSRSSLKP

SEQ ID NO: 24424 - protein, 70 aa, Synthetic construct
GALKNFVIPKIKRDKDGNVTEPKDKVEKIGLVEDLNKGAKPVVVLQKLSLDDVQKLIKDREDKSRSSLKP

SEQ ID NO: 24425 - protein, 70 aa, Synthetic construct
GALKNFVIPKIKRDKDGNVTQETKKVEKIGLVEDLNKGAKPVVVLQKLSLDDVQKLIKDREDKSRSSLKP

SEQ ID NO: 24426 - protein, 70 aa, Synthetic construct
GALKNFVIPKIKRDKDGNVTQETKKMEMKGLVEDLNKGAKPVVVLQKLSLDDVQKLIKDREDKSRSSLKP

SEQ ID NO: 24427 - protein, 70 aa, Synthetic construct
GALKNFVIPKIKRDKDGNVTQETKKMEMKGEPKDKNKGAKPVVVLQKLSLDDVQKLIKDREDKSRSSLKP

SEQ ID NO: 24428 - protein, 70 aa, Synthetic construct
GALKNFVIPKIKRDKDGNVTQETKKMEMKGEPKDKVEKIGPVVVLQKLSLDDVQKLIKDREDKSRSSLKP

SEQ ID NO: 24429 - protein, 70 aa, Synthetic construct
GALKNFVIPKIKRDKDGNVTQETKKMEMKGEPKDKVEKIGLVEDLNKGAKPVVVLQKLSLDDVQKSSLKP

SEQ ID NO: 24430 - protein, 70 aa, Synthetic construct
GALKNFVIPKIKRDKDGNVTQETKKMEMKGEPKDKVEKIGLVEDLNKGAKPVVVLQKLSLDDVQKLIKDR

SEQ ID NO: 24431 - protein, 70 aa, Synthetic construct
ESSPGGGSGGGGGSSPGEADTGRRRALMLPAVLQAPGNHQHPHRITNFFIDNILRPEFGRRKDAGTCCAG

SEQ ID NO: 24432 - protein, 70 aa, Synthetic construct
AAAVEGGSGGGGGSSPGEADTGRRRALMLPAVLQAPGNHQHPHRITNFFIDNILRPEFGRRKDAGTCCAG

SEQ ID NO: 24433 - protein, 70 aa, Synthetic construct
AAAVEGQRQPGGGSSPGEADTGRRRALMLPAVLQAPGNHQHPHRITNFFIDNILRPEFGRRKDAGTCCAG

SEQ ID NO: 24434 - protein, 70 aa, Synthetic construct
AAAVEGQRQPESSPGPGEADTGRRRALMLPAVLQAPGNHQHPHRITNFFIDNILRPEFGRRKDAGTCCAG

SEQ ID NO: 24435 - protein, 70 aa, Synthetic construct
AAAVEGQRQPESSPGGGSGGTGRRRALMLPAVLQAPGNHQHPHRITNFFIDNILRPEFGRRKDAGTCCAG

SEQ ID NO: 24436 - protein, 70 aa, Synthetic construct
AAAVEGQRQPESSPGGGSGGGGGSSALMLPAVLQAPGNHQHPHRITNFFIDNILRPEFGRRKDAGTCCAG

SEQ ID NO: 24437 - protein, 70 aa, Synthetic construct
AAAVEGQRQPESSPGGGSGGGGGSSPGEADAVLQAPGNHQHPHRITNFFIDNILRPEFGRRKDAGTCCAG

SEQ ID NO: 24438 - protein, 70 aa, Synthetic construct
AAAVEGQRQPESSPGGGSGGGGGSSPGEADTGRRRPGNHQHPHRITNFFIDNILRPEFGRRKDAGTCCAG

SEQ ID NO: 24439 - protein, 70 aa, Synthetic construct
AAAVEGQRQPESSPGGGSGGGGGSSPGEADTGRRRALMLPHPHRITNFFIDNILRPEFGRRKDAGTCCAG

SEQ ID NO: 24440 - protein, 70 aa, Synthetic construct
AAAVEGQRQPESSPGGGSGGGGGSSPGEADTGRRRALMLPAVLQATNFFIDNILRPEFGRRKDAGTCCAG

SEQ ID NO: 24441 - protein, 70 aa, Synthetic construct
AAAVEGQRQPESSPGGGSGGGGGSSPGEADTGRRRALMLPAVLQAPGNHQHPHRITNFFIDNILRTCCAG

SEQ ID NO: 24442 - protein, 70 aa, Synthetic construct
AAAVEGQRQPESSPGGGSGGGGGSSPGEADTGRRRALMLPAVLQAPGNHQHPHRITNFFIDNILRPEFGR

SEQ ID NO: 24443 - protein, 70 aa, Synthetic construct
VQLEDTTSCKTFCSLSCLSSYEEKRKPFVTSMCQKTAIIQYEVKYQNVKHNLCSNACLSKFHSANNFIMN

SEQ ID NO: 24444 - protein, 70 aa, Synthetic construct
VQLEDTTSCKTFCSLSCLSSYEEKRKPFVTICTNSTAIIQYEVKYQNVKHNLCSNACLSKFHSANNFIMN

SEQ ID NO: 24445 - protein, 70 aa, Synthetic construct
VQLEDTTSCKTFCSLSCLSSYEEKRKPFVTICTNSILTKCYEVKYQNVKHNLCSNACLSKFHSANNFIMN

SEQ ID NO: 24446 - protein, 70 aa, Synthetic construct
VQLEDTTSCKTFCSLSCLSSYEEKRKPFVTICTNSILTKCSMCQKQNVKHNLCSNACLSKFHSANNFIMN

SEQ ID NO: 24447 - protein, 70 aa, Synthetic construct
VQLEDTTSCKTFCSLSCLSSYEEKRKPFVTICTNSILTKCSMCQKTAIIQNLCSNACLSKFHSANNFIMN

SEQ ID NO: 24448 - protein, 70 aa, Synthetic construct
SKSITAYKQKPAKPLISVPCKPLKPSDEMIETTSDLGKTELFCSINCFSAYSKAKMESSSVSVVSVVHDT

SEQ ID NO: 24449 - protein, 70 aa, Synthetic construct
MEGQSAYKQKPAKPLISVPCKPLKPSDEMIETTSDLGKTELFCSINCFSAYSKAKMESSSVSVVSVVHDT

SEQ ID NO: 24450 - protein, 70 aa, Synthetic construct
MEGQSHYFNSPAKPLISVPCKPLKPSDEMIETTSDLGKTELFCSINCFSAYSKAKMESSSVSVVSVVHDT

SEQ ID NO: 24451 - protein, 70 aa, Synthetic construct
MEGQSHYFNSSKSITISVPCKPLKPSDEMIETTSDLGKTELFCSINCFSAYSKAKMESSSVSVVSVVHDT

SEQ ID NO: 24452 - protein, 70 aa, Synthetic construct
MEGQSHYFNSSKSITAYKQKKPLKPSDEMIETTSDLGKTELFCSINCFSAYSKAKMESSSVSVVSVVHDT

SEQ ID NO: 24453 - protein, 70 aa, Synthetic construct
MEGQSHYFNSSKSITAYKQKPAKPLSDEMIETTSDLGKTELFCSINCFSAYSKAKMESSSVSVVSVVHDT

SEQ ID NO: 24454 - protein, 70 aa, Synthetic construct
MEGQSHYFNSSKSITAYKQKPAKPLISVPCETTSDLGKTELFCSINCFSAYSKAKMESSSVSVVSVVHDT

SEQ ID NO: 24455 - protein, 70 aa, Synthetic construct
MEGQSHYFNSSKSITAYKQKPAKPLISVPCKPLKPLGKTELFCSINCFSAYSKAKMESSSVSVVSVVHDT

SEQ ID NO: 24456 - protein, 70 aa, Synthetic construct
MEGQSHYFNSSKSITAYKQKPAKPLISVPCKPLKPSDEMILFCSINCFSAYSKAKMESSSVSVVSVVHDT

SEQ ID NO: 24457 - protein, 70 aa, Synthetic construct
MEGQSHYFNSSKSITAYKQKPAKPLISVPCKPLKPSDEMIETTSDLGKTELFCSINCFSAYSKAKMESSS

SEQ ID NO: 24458 - protein, 70 aa, Synthetic construct
LFCSINCFSAYSKAKMESSSVSVVSVVHDTSTELLSPKKDTTPVISNIVSLADTDVALPIMNTDVLQDTV

SEQ ID NO: 24459 - protein, 70 aa, Synthetic construct
ETTSDNCFSAYSKAKMESSSVSVVSVVHDTSTELLSPKKDTTPVISNIVSLADTDVALPIMNTDVLQDTV

SEQ ID NO: 24460 - protein, 70 aa, Synthetic construct
ETTSDLGKTEYSKAKMESSSVSVVSVVHDTSTELLSPKKDTTPVISNIVSLADTDVALPIMNTDVLQDTV

SEQ ID NO: 24461 - protein, 70 aa, Synthetic construct
ETTSDLGKTELFCSIMESSSVSVVSVVHDTSTELLSPKKDTTPVISNIVSLADTDVALPIMNTDVLQDTV

SEQ ID NO: 24462 - protein, 70 aa, Synthetic construct
ETTSDLGKTELFCSINCFSAVSVVSVVHDTSTELLSPKKDTTPVISNIVSLADTDVALPIMNTDVLQDTV

SEQ ID NO: 24463 - protein, 70 aa, Synthetic construct
ETTSDLGKTELFCSINCFSAYSKAKVVHDTSTELLSPKKDTTPVISNIVSLADTDVALPIMNTDVLQDTV

SEQ ID NO: 24464 - protein, 70 aa, Synthetic construct
ETTSDLGKTELFCSINCFSAYSKAKMESSSSTELLSPKKDTTPVISNIVSLADTDVALPIMNTDVLQDTV

SEQ ID NO: 24465 - protein, 70 aa, Synthetic construct
ETTSDLGKTELFCSINCFSAYSKAKMESSSVSVVSSPKKDTTPVISNIVSLADTDVALPIMNTDVLQDTV

SEQ ID NO: 24466 - protein, 70 aa, Synthetic construct
ETTSDLGKTELFCSINCFSAYSKAKMESSSVSVVSVVHDTTTPVISNIVSLADTDVALPIMNTDVLQDTV

SEQ ID NO: 24467 - protein, 70 aa, Synthetic construct
ETTSDLGKTELFCSINCFSAYSKAKMESSSVSVVSVVHDTSTELLSNIVSLADTDVALPIMNTDVLQDTV

SEQ ID NO: 24468 - protein, 70 aa, Synthetic construct
ETTSDLGKTELFCSINCFSAYSKAKMESSSVSVVSVVHDTSTELLSPKKDLADTDVALPIMNTDVLQDTV

SEQ ID NO: 24469 - protein, 70 aa, Synthetic construct
ETTSDLGKTELFCSINCFSAYSKAKMESSSVSVVSVVHDTSTELLSPKKDTTPVIVALPIMNTDVLQDTV

SEQ ID NO: 24470 - protein, 70 aa, Synthetic construct
ETTSDLGKTELFCSINCFSAYSKAKMESSSVSVVSVVHDTSTELLSPKKDTTPVISNIVSMNTDVLQDTV

SEQ ID NO: 24471 - protein, 70 aa, Synthetic construct
ETTSDLGKTELFCSINCFSAYSKAKMESSSVSVVSVVHDTSTELLSPKKDTTPVISNIVSLADTDLQDTV

SEQ ID NO: 24472 - protein, 70 aa, Synthetic construct
ETTSDLGKTELFCSINCFSAYSKAKMESSSVSVVSVVHDTSTELLSPKKDTTPVISNIVSLADTDVALPI

SEQ ID NO: 24473 - protein, 70 aa, Synthetic construct
ALPQGQLTFKDVAIEFSQEEWTCLDPAQKTLYRDVMLENYKCVNTDLPPKGKNNMGEAFYTVKLERLESC

SEQ ID NO: 24474 - protein, 70 aa, Synthetic construct
ALPQGQLTFKDVAIEFSQEEWTCLDPAQKTLYRDVMLENYRNLVSDLPPKGKNNMGEAFYTVKLERLESC

SEQ ID NO: 24475 - protein, 70 aa, Synthetic construct
ALPQGQLTFKDVAIEFSQEEWTCLDPAQKTLYRDVMLENYRNLVSLDISCGKNNMGEAFYTVKLERLESC

SEQ ID NO: 24476 - protein, 70 aa, Synthetic construct
ALPQGQLTFKDVAIEFSQEEWTCLDPAQKTLYRDVMLENYRNLVSLDISCKCVNTGEAFYTVKLERLESC

SEQ ID NO: 24477 - protein, 70 aa, Synthetic construct
ALPQGQLTFKDVAIEFSQEEWTCLDPAQKTLYRDVMLENYRNLVSLDISCKCVNTDLPPKTVKLERLESC

SEQ ID NO: 24478 - protein, 70 aa, Synthetic construct
ALPQGQLTFKDVAIEFSQEEWTCLDPAQKTLYRDVMLENYRNLVSLDISCKCVNTDLPPKGKNNMRLESC

SEQ ID NO: 24479 - protein, 70 aa, Synthetic construct
ALPQGQLTFKDVAIEFSQEEWTCLDPAQKTLYRDVMLENYRNLVSLDISCKCVNTDLPPKGKNNMGEAFY

SEQ ID NO: 24480 - protein, 70 aa, Synthetic construct
FQIANSSSSSSGGAGGANPAKKKRKRCGVCVPCKRLINCGVCSSCRNRKTGHQICKFRKCEELKKKPGTS

SEQ ID NO: 24481 - protein, 70 aa, Synthetic construct
FQIANLADCPSGGAGGANPAKKKRKRCGVCVPCKRLINCGVCSSCRNRKTGHQICKFRKCEELKKKPGTS

SEQ ID NO: 24482 - protein, 70 aa, Synthetic construct
FQIANLADCPQNHSSGANPAKKKRKRCGVCVPCKRLINCGVCSSCRNRKTGHQICKFRKCEELKKKPGTS

SEQ ID NO: 24483 - protein, 70 aa, Synthetic construct
FQIANLADCPQNHSSSSSSSKKKRKRCGVCVPCKRLINCGVCSSCRNRKTGHQICKFRKCEELKKKPGTS

SEQ ID NO: 24484 - protein, 70 aa, Synthetic construct
GENKPSTCSFSIERILGLDQKKDCVPLMKPHRPWADTCSSSGKDGNLCLHVPNPPSGISFPSVVDHPMPE

SEQ ID NO: 24485 - protein, 70 aa, Synthetic construct
SPSLQSTCSFSIERILGLDQKKDCVPLMKPHRPWADTCSSSGKDGNLCLHVPNPPSGISFPSVVDHPMPE

SEQ ID NO: 24486 - protein, 70 aa, Synthetic construct
SPSLQEGAQLGENKPSTCSFSIERILGLDQHRPWADTCSSSGKDGNLCLHVPNPPSGISFPSVVDHPMPE

SEQ ID NO: 24487 - protein, 70 aa, Synthetic construct
SPSLQEGAQLGENKPSTCSFSIERILGLDQKKDCVDTCSSSGKDGNLCLHVPNPPSGISFPSVVDHPMPE

SEQ ID NO: 24488 - protein, 70 aa, Synthetic construct
SPSLQEGAQLGENKPSTCSFSIERILGLDQKKDCVPLMKPSGKDGNLCLHVPNPPSGISFPSVVDHPMPE

SEQ ID NO: 24489 - protein, 70 aa, Synthetic construct
SPSLQEGAQLGENKPSTCSFSIERILGLDQKKDCVPLMKPHRPWANLCLHVPNPPSGISFPSVVDHPMPE

SEQ ID NO: 24490 - protein, 70 aa, Synthetic construct
SPSLQEGAQLGENKPSTCSFSIERILGLDQKKDCVPLMKPHRPWADTCSSVPNPPSGISFPSVVDHPMPE

SEQ ID NO: 24491 - protein, 70 aa, Synthetic construct
SPSLQEGAQLGENKPSTCSFSIERILGLDQKKDCVPLMKPHRPWADTCSSSGKDGSGISFPSVVDHPMPE

SEQ ID NO: 24492 - protein, 70 aa, Synthetic construct
SPSLQEGAQLGENKPSTCSFSIERILGLDQKKDCVPLMKPHRPWADTCSSSGKDGNLCLHPSVVDHPMPE

SEQ ID NO: 24493 - protein, 70 aa, Synthetic construct
SPSLQEGAQLGENKPSTCSFSIERILGLDQKKDCVPLMKPHRPWADTCSSSGKDGNLCLHVPNPPHPMPE

SEQ ID NO: 24494 - protein, 70 aa, Synthetic construct
SPSLQEGAQLGENKPSTCSFSIERILGLDQKKDCVPLMKPHRPWADTCSSSGKDGNLCLHVPNPPSGISF

SEQ ID NO: 24495 - protein, 70 aa, Synthetic construct
YQDSFEQRFLEETNRLYAAEPEYLHHVNKRLEEEADRLITYLDQTTQKSLIATVEKQLLGEHLTAILQKG

SEQ ID NO: 24496 - protein, 70 aa, Synthetic construct
YQDSFEQRFLEETNRLYAAEGQKLMHVNKRLEEEADRLITYLDQTTQKSLIATVEKQLLGEHLTAILQKG

SEQ ID NO: 24497 - protein, 70 aa, Synthetic construct
YQDSFEQRFLEETNRLYAAEGQKLMQEREVLEEEADRLITYLDQTTQKSLIATVEKQLLGEHLTAILQKG

SEQ ID NO: 24498 - protein, 70 aa, Synthetic construct
YQDSFEQRFLEETNRLYAAEGQKLMQEREVPEYLHDRLITYLDQTTQKSLIATVEKQLLGEHLTAILQKG

SEQ ID NO: 24499 - protein, 70 aa, Synthetic construct
YQDSFEQRFLEETNRLYAAEGQKLMQEREVPEYLHHVNKRYLDQTTQKSLIATVEKQLLGEHLTAILQKG

SEQ ID NO: 24500 - protein, 70 aa, Synthetic construct
YQDSFEQRFLEETNRLYAAEGQKLMQEREVPEYLHHVNKRLEEEATQKSLIATVEKQLLGEHLTAILQKG

SEQ ID NO: 24501 - protein, 70 aa, Synthetic construct
YQDSFEQRFLEETNRLYAAEGQKLMQEREVPEYLHHVNKRLEEEADRLITIATVEKQLLGEHLTAILQKG

SEQ ID NO: 24502 - protein, 70 aa, Synthetic construct
YQDSFEQRFLEETNRLYAAEGQKLMQEREVPEYLHHVNKRLEEEADRLITYLDQTKQLLGEHLTAILQKG

SEQ ID NO: 24503 - protein, 70 aa, Synthetic construct
YQDSFEQRFLEETNRLYAAEGQKLMQEREVPEYLHHVNKRLEEEADRLITYLDQTTQKSLEHLTAILQKG

SEQ ID NO: 24504 - protein, 70 aa, Synthetic construct
YQDSFEQRFLEETNRLYAAEGQKLMQEREVPEYLHHVNKRLEEEADRLITYLDQTTQKSLIATVEILQKG

SEQ ID NO: 24505 - protein, 70 aa, Synthetic construct
YQDSFEQRFLEETNRLYAAEGQKLMQEREVPEYLHHVNKRLEEEADRLITYLDQTTQKSLIATVEKQLLG

SEQ ID NO: 24506 - protein, 70 aa, Synthetic construct
DQQKGEISGFGQCLVWVQCSCGNIDPSVLPDNWSCDQNTDVQYNRCDIPEETWTGLESDVAYASYIPGSI

SEQ ID NO: 24507 - protein, 70 aa, Synthetic construct
DQQKGEISGFGQCLVWVQCSFPNCGKWRRLCGNIDPSVLPVQYNRCDIPEETWTGLESDVAYASYIPGSI

SEQ ID NO: 24508 - protein, 70 aa, Synthetic construct
DQQKGEISGFGQCLVWVQCSFPNCGKWRRLCGNIDPSVLPDNWSCCDIPEETWTGLESDVAYASYIPGSI

SEQ ID NO: 24509 - protein, 70 aa, Synthetic construct
DQQKGEISGFGQCLVWVQCSFPNCGKWRRLCGNIDPSVLPDNWSCDQNTDVQYNRLESDVAYASYIPGSI

SEQ ID NO: 24510 - protein, 70 aa, Synthetic construct
DQQKGEISGFGQCLVWVQCSFPNCGKWRRLCGNIDPSVLPDNWSCDQNTDVQYNRCDIPEAYASYIPGSI

SEQ ID NO: 24511 - protein, 70 aa, Synthetic construct
DQQKGEISGFGQCLVWVQCSFPNCGKWRRLCGNIDPSVLPDNWSCDQNTDVQYNRCDIPEETWTGLESDV

SEQ ID NO: 24512 - protein, 70 aa, Synthetic construct
THSFLHPSYYNVSLTSAVSQSKELTKTEASKSISRQSEKAHSSGKLQKTVSYPDVSLEEQEKMDLKTSRE

SEQ ID NO: 24513 - protein, 70 aa, Synthetic construct
THSFLHPSYYLYMCDKVVAPSKELTKTEASKSISRQSEKAHSSGKLQKTVSYPDVSLEEQEKMDLKTSRE

SEQ ID NO: 24514 - protein, 70 aa, Synthetic construct
THSFLHPSYYLYMCDKVVAPNVSLTKTEASKSISRQSEKAHSSGKLQKTVSYPDVSLEEQEKMDLKTSRE

SEQ ID NO: 24515 - protein, 70 aa, Synthetic construct
THSFLHPSYYLYMCDKVVAPNVSLTSAVSQKSISRQSEKAHSSGKLQKTVSYPDVSLEEQEKMDLKTSRE

SEQ ID NO: 24516 - protein, 70 aa, Synthetic construct
THSFLHPSYYLYMCDKVVAPNVSLTSAVSQSKELTQSEKAHSSGKLQKTVSYPDVSLEEQEKMDLKTSRE

SEQ ID NO: 24517 - protein, 70 aa, Synthetic construct
THSFLHPSYYLYMCDKVVAPNVSLTSAVSQSKELTKTEASKSISRLQKTVSYPDVSLEEQEKMDLKTSRE

SEQ ID NO: 24518 - protein, 70 aa, Synthetic construct
THSFLHPSYYLYMCDKVVAPNVSLTSAVSQSKELTKTEASKSISRQSEKASYPDVSLEEQEKMDLKTSRE

SEQ ID NO: 24519 - protein, 70 aa, Synthetic construct
SYPDVSLEEQEKMDLDASISNNSTSKRKSESATCNLVRDINKVGIGLVAAASSPLLVKDVICEDDKGKIM

SEQ ID NO: 24520 - protein, 70 aa, Synthetic construct
SYPDVSLEEQEKMDLKTSRENNSTSKRKSESATCNLVRDINKVGIGLVAAASSPLLVKDVICEDDKGKIM

SEQ ID NO: 24521 - protein, 70 aa, Synthetic construct
SYPDVSLEEQEKMDLKTSRELCSRLKRKSESATCNLVRDINKVGIGLVAAASSPLLVKDVICEDDKGKIM

SEQ ID NO: 24522 - protein, 70 aa, Synthetic construct
SYPDVSLEEQEKMDLKTSRELCSRLDASISSATCNLVRDINKVGIGLVAAASSPLLVKDVICEDDKGKIM

SEQ ID NO: 24523 - protein, 70 aa, Synthetic construct
SYPDVSLEEQEKMDLKTSRELCSRLDASISNNSTSLVRDINKVGIGLVAAASSPLLVKDVICEDDKGKIM

SEQ ID NO: 24524 - protein, 70 aa, Synthetic construct
SYPDVSLEEQEKMDLKTSRELCSRLDASISNNSTSKRKSENKVGIGLVAAASSPLLVKDVICEDDKGKIM

SEQ ID NO: 24525 - protein, 70 aa, Synthetic construct
SYPDVSLEEQEKMDLKTSRELCSRLDASISNNSTSKRKSESATCNGLVAAASSPLLVKDVICEDDKGKIM

SEQ ID NO: 24526 - protein, 70 aa, Synthetic construct
SYPDVSLEEQEKMDLKTSRELCSRLDASISNNSTSKRKSESATCNLVRDIASSPLLVKDVICEDDKGKIM

SEQ ID NO: 24527 - protein, 70 aa, Synthetic construct
SYPDVSLEEQEKMDLKTSRELCSRLDASISNNSTSKRKSESATCNLVRDINKVGILVKDVICEDDKGKIM

SEQ ID NO: 24528 - protein, 70 aa, Synthetic construct
SYPDVSLEEQEKMDLKTSRELCSRLDASISNNSTSKRKSESATCNLVRDINKVGIGLVAAICEDDKGKIM

SEQ ID NO: 24529 - protein, 70 aa, Synthetic construct
SYPDVSLEEQEKMDLKTSRELCSRLDASISNNSTSKRKSESATCNLVRDINKVGIGLVAAASSPLKGKIM

SEQ ID NO: 24530 - protein, 70 aa, Synthetic construct
SYPDVSLEEQEKMDLKTSRELCSRLDASISNNSTSKRKSESATCNLVRDINKVGIGLVAAASSPLLVKDV

SEQ ID NO: 24531 - protein, 70 aa, Synthetic construct
KKLEQIMKQKCTCDSNLEKDKEAEYAGQLAELRQRLQDELRQEREARQKLEMMIKELKLQILKSSKTAKE

SEQ ID NO: 24532 - protein, 70 aa, Synthetic construct
KKLEQIMKQKCTCDSNLEKDKEAEYAGQLAELRQRLDHAEADRQEARQKLEMMIKELKLQILKSSKTAKE

SEQ ID NO: 24533 - protein, 70 aa, Synthetic construct
AGNPRDMRRFQVVVSTTVNVDGHVLAVSDNMFVHNNSKHGRRARRLDPSEATPCIKAISPSEGWTTGGAT

SEQ ID NO: 24534 - protein, 70 aa, Synthetic construct
LKCNQDMRRFQVVVSTTVNVDGHVLAVSDNMFVHNNSKHGRRARRLDPSEATPCIKAISPSEGWTTGGAT

SEQ ID NO: 24535 - protein, 70 aa, Synthetic construct
LKCNQNCLKNAGNPRDMRRFQVVVSTTVNVDGHVLAVSDNMFVHNLDPSEATPCIKAISPSEGWTTGGAT

SEQ ID NO: 24536 - protein, 70 aa, Synthetic construct
LKCNQNCLKNAGNPRDMRRFQVVVSTTVNVDGHVLAVSDNMFVHNNSKHGATPCIKAISPSEGWTTGGAT

SEQ ID NO: 24537 - protein, 70 aa, Synthetic construct
LKCNQNCLKNAGNPRDMRRFQVVVSTTVNVDGHVLAVSDNMFVHNNSKHGRRARRKAISPSEGWTTGGAT

SEQ ID NO: 24538 - protein, 70 aa, Synthetic construct
LKCNQNCLKNAGNPRDMRRFQVVVSTTVNVDGHVLAVSDNMFVHNNSKHGRRARRLDPSESEGWTTGGAT

SEQ ID NO: 24539 - protein, 70 aa, Synthetic construct
LKCNQNCLKNAGNPRDMRRFQVVVSTTVNVDGHVLAVSDNMFVHNNSKHGRRARRLDPSEATPCITGGAT

SEQ ID NO: 24540 - protein, 70 aa, Synthetic construct
LKCNQNCLKNAGNPRDMRRFQVVVSTTVNVDGHVLAVSDNMFVHNNSKHGRRARRLDPSEATPCIKAISP

SEQ ID NO: 24541 - protein, 70 aa, Synthetic construct
EHLATVVALQCSILKHLSAKQMPSHWDSEQTEKADIKPVIVTDSSVTTSLQTADKTPTPSHYPLSCPSGI

SEQ ID NO: 24542 - protein, 70 aa, Synthetic construct
EHLATQAEQQCSILKHLSAKQMPSHWDSEQTEKADIKPVIVTDSSVTTSLQTADKTPTPSHYPLSCPSGI

SEQ ID NO: 24543 - protein, 70 aa, Synthetic construct
EHLATQAEQQEWLCSHLSAKQMPSHWDSEQTEKADIKPVIVTDSSVTTSLQTADKTPTPSHYPLSCPSGI

SEQ ID NO: 24544 - protein, 70 aa, Synthetic construct
EHLATQAEQQEWLCSVVALQQMPSHWDSEQTEKADIKPVIVTDSSVTTSLQTADKTPTPSHYPLSCPSGI

SEQ ID NO: 24545 - protein, 70 aa, Synthetic construct
EHLATQAEQQEWLCSVVALQCSILKHLSAKQMPSHWDSEQTEKADIKPVIQTADKTPTPSHYPLSCPSGI

SEQ ID NO: 24546 - protein, 70 aa, Synthetic construct
EHLATQAEQQEWLCSVVALQCSILKHLSAKQMPSHWDSEQTEKADIKPVIVTDSSTPTPSHYPLSCPSGI

SEQ ID NO: 24547 - protein, 70 aa, Synthetic construct
EHLATQAEQQEWLCSVVALQCSILKHLSAKQMPSHWDSEQTEKADIKPVIVTDSSVTTSLHYPLSCPSGI

SEQ ID NO: 24548 - protein, 70 aa, Synthetic construct
EHLATQAEQQEWLCSVVALQCSILKHLSAKQMPSHWDSEQTEKADIKPVIVTDSSVTTSLQTADKCPSGI

SEQ ID NO: 24549 - protein, 70 aa, Synthetic construct
EHLATQAEQQEWLCSVVALQCSILKHLSAKQMPSHWDSEQTEKADIKPVIVTDSSVTTSLQTADKTPTPS

SEQ ID NO: 24550 - protein, 70 aa, Synthetic construct
REKPLKCPDCEKRFKYASDLQRHRRVHTGEKPYKCPNCDKAFKQREHLNKHQGVHAREQQFKCVWCGERF

SEQ ID NO: 24551 - protein, 70 aa, Synthetic construct
EFVQHKCPDCEKRFKYASDLQRHRRVHTGEKPYKCPNCDKAFKQREHLNKHQGVHAREQQFKCVWCGERF

SEQ ID NO: 24552 - protein, 70 aa, Synthetic construct
EFVQHRCDPAREKPLKCPDCEKRFKVHTGEKPYKCPNCDKAFKQREHLNKHQGVHAREQQFKCVWCGERF

SEQ ID NO: 24553 - protein, 70 aa, Synthetic construct
EFVQHRCDPAREKPLKCPDCEKRFKYASDLQRHRRVHTGEKPYKCPNCDKAFKQREHLNKHQGVHCGERF

SEQ ID NO: 24554 - protein, 70 aa, Synthetic construct
EFVQHRCDPAREKPLKCPDCEKRFKYASDLQRHRRVHTGEKPYKCPNCDKAFKQREHLNKHQGVHAREQQ

SEQ ID NO: 24555 - protein, 70 aa, Synthetic construct
SREERRRRRRATAKYRTAHATRERIRVEAFNLAFAELRKLLPTLPPDKKLSKIEILRLAICYISYLNHVL

SEQ ID NO: 24556 - protein, 70 aa, Synthetic construct
EPGRKRRRRRATAKYRTAHATRERIRVEAFNLAFAELRKLLPTLPPDKKLSKIEILRLAICYISYLNHVL

SEQ ID NO: 24557 - protein, 70 aa, Synthetic construct
EPGRKDLQHLATAKYRTAHATRERIRVEAFNLAFAELRKLLPTLPPDKKLSKIEILRLAICYISYLNHVL

SEQ ID NO: 24558 - protein, 70 aa, Synthetic construct
EPGRKDLQHLSREERRTAHATRERIRVEAFNLAFAELRKLLPTLPPDKKLSKIEILRLAICYISYLNHVL

SEQ ID NO: 24559 - protein, 70 aa, Synthetic construct
EPGRKDLQHLSREERRRRRRTRERIRVEAFNLAFAELRKLLPTLPPDKKLSKIEILRLAICYISYLNHVL

SEQ ID NO: 24560 - protein, 70 aa, Synthetic construct
EPGRKDLQHLSREERRRRRRATAKYRVEAFNLAFAELRKLLPTLPPDKKLSKIEILRLAICYISYLNHVL

SEQ ID NO: 24561 - protein, 70 aa, Synthetic construct
EPGRKDLQHLSREERRRRRRATAKYRTAHANLAFAELRKLLPTLPPDKKLSKIEILRLAICYISYLNHVL

SEQ ID NO: 24562 - protein, 70 aa, Synthetic construct
RAGTSCANCQTTTTTLWRRNANGDPVCNACGLYYKLHNINRPLTMKKEGIQTRNRKMSSKSKKCKKVHDS

SEQ ID NO: 24563 - protein, 70 aa, Synthetic construct
KPKRRCANCQTTTTTLWRRNANGDPVCNACGLYYKLHNINRPLTMKKEGIQTRNRKMSSKSKKCKKVHDS

SEQ ID NO: 24564 - protein, 70 aa, Synthetic construct
KPKRRLSAARRAGTSCANCQTTTTTLWRRNANGDPVCNACGLYYKLHNINRPLTMKKEGIQTRNRKVHDS

SEQ ID NO: 24565 - protein, 70 aa, Synthetic construct
KPKRRLSAARRAGTSCANCQTTTTTLWRRNANGDPVCNACGLYYKLHNINRPLTMKKEGIQTRNRKMSSK

SEQ ID NO: 24566 - protein, 70 aa, Synthetic construct
SEGAGGHAPGKEHKIMVGSTDDPSVFSLPDSKLPGDKEFVSWQQDLEDSVKPTQQARPTVIRWSEGGKEV

SEQ ID NO: 24567 - protein, 70 aa, Synthetic construct
GERHGGHAPGKEHKIMVGSTDDPSVFSLPDSKLPGDKEFVSWQQDLEDSVKPTQQARPTVIRWSEGGKEV

SEQ ID NO: 24568 - protein, 70 aa, Synthetic construct
GERHGAKAARKEHKIMVGSTDDPSVFSLPDSKLPGDKEFVSWQQDLEDSVKPTQQARPTVIRWSEGGKEV

SEQ ID NO: 24569 - protein, 70 aa, Synthetic construct
GERHGAKAARSEGAGMVGSTDDPSVFSLPDSKLPGDKEFVSWQQDLEDSVKPTQQARPTVIRWSEGGKEV

SEQ ID NO: 24570 - protein, 70 aa, Synthetic construct
GERHGAKAARSEGAGGHAPGDDPSVFSLPDSKLPGDKEFVSWQQDLEDSVKPTQQARPTVIRWSEGGKEV

SEQ ID NO: 24571 - protein, 70 aa, Synthetic construct
GERHGAKAARSEGAGGHAPGKEHKIFSLPDSKLPGDKEFVSWQQDLEDSVKPTQQARPTVIRWSEGGKEV

SEQ ID NO: 24572 - protein, 70 aa, Synthetic construct
GERHGAKAARSEGAGGHAPGKEHKIMVGSTSKLPGDKEFVSWQQDLEDSVKPTQQARPTVIRWSEGGKEV

SEQ ID NO: 24573 - protein, 70 aa, Synthetic construct
GERHGAKAARSEGAGGHAPGKEHKIMVGSTDDPSVDKEFVSWQQDLEDSVKPTQQARPTVIRWSEGGKEV

SEQ ID NO: 24574 - protein, 70 aa, Synthetic construct
GERHGAKAARSEGAGGHAPGKEHKIMVGSTDDPSVFSLPDSWQQDLEDSVKPTQQARPTVIRWSEGGKEV

SEQ ID NO: 24575 - protein, 70 aa, Synthetic construct
GERHGAKAARSEGAGGHAPGKEHKIMVGSTDDPSVFSLPDSKLPGLEDSVKPTQQARPTVIRWSEGGKEV

SEQ ID NO: 24576 - protein, 70 aa, Synthetic construct
GERHGAKAARSEGAGGHAPGKEHKIMVGSTDDPSVFSLPDSKLPGDKEFVKPTQQARPTVIRWSEGGKEV

SEQ ID NO: 24577 - protein, 70 aa, Synthetic construct
GERHGAKAARSEGAGGHAPGKEHKIMVGSTDDPSVFSLPDSKLPGDKEFVSWQQDARPTVIRWSEGGKEV

SEQ ID NO: 24578 - protein, 70 aa, Synthetic construct
GDKPNHCTLCDLWFMQGNELRRHLSDAHNISERLVTEEVLSVETRVQTEPVTSMTIIEQVGKVHVLPLLQ

SEQ ID NO: 24579 - protein, 70 aa, Synthetic construct
QFKDHHCTLCDLWFMQGNELRRHLSDAHNISERLVTEEVLSVETRVQTEPVTSMTIIEQVGKVHVLPLLQ

SEQ ID NO: 24580 - protein, 70 aa, Synthetic construct
QFKDHLVIHTGDKPNHCTLCDLWFMQGNELRRHLSDAHNISERLVTEEVLVTSMTIIEQVGKVHVLPLLQ

SEQ ID NO: 24581 - protein, 70 aa, Synthetic construct
QFKDHLVIHTGDKPNHCTLCDLWFMQGNELRRHLSDAHNISERLVTEEVLSVETRIIEQVGKVHVLPLLQ

SEQ ID NO: 24582 - protein, 70 aa, Synthetic construct
QFKDHLVIHTGDKPNHCTLCDLWFMQGNELRRHLSDAHNISERLVTEEVLSVETRVQTEPGKVHVLPLLQ

SEQ ID NO: 24583 - protein, 70 aa, Synthetic construct
QFKDHLVIHTGDKPNHCTLCDLWFMQGNELRRHLSDAHNISERLVTEEVLSVETRVQTEPVTSMTLPLLQ

SEQ ID NO: 24584 - protein, 70 aa, Synthetic construct
QFKDHLVIHTGDKPNHCTLCDLWFMQGNELRRHLSDAHNISERLVTEEVLSVETRVQTEPVTSMTIIEQV

SEQ ID NO: 24585 - protein, 70 aa, Synthetic construct
RVKLVNLGFQALRQHVPHGGASKKLSKVETLRSAVEYIRALQRLLAGGLRPQAVRPSAPRGPPGTTPVAA

SEQ ID NO: 24586 - protein, 70 aa, Synthetic construct
RVKLVNLGFQALRQHVPHGGASKKLSKVETLRSAVEYIRALQRLLAEHDAPQAVRPSAPRGPPGTTPVAA

SEQ ID NO: 24587 - protein, 70 aa, Synthetic construct
RVKLVNLGFQALRQHVPHGGASKKLSKVETLRSAVEYIRALQRLLAEHDAVRNALPSAPRGPPGTTPVAA

SEQ ID NO: 24588 - protein, 70 aa, Synthetic construct
RVKLVNLGFQALRQHVPHGGASKKLSKVETLRSAVEYIRALQRLLAEHDAVRNALAGGLRGPPGTTPVAA

SEQ ID NO: 24589 - protein, 70 aa, Synthetic construct
RVKLVNLGFQALRQHVPHGGASKKLSKVETLRSAVEYIRALQRLLAEHDAVRNALAGGLRPQAVRTPVAA

SEQ ID NO: 24590 - protein, 70 aa, Synthetic construct
RVKLVNLGFQALRQHVPHGGASKKLSKVETLRSAVEYIRALQRLLAEHDAVRNALAGGLRPQAVRPSAPR

SEQ ID NO: 24591 - protein, 70 aa, Synthetic construct
ARRAGTCCANCQTTTTTLWRRNANGDPVCNACGLYYKLHNVNRPLTMKKEGIQTRNRKMSNKSKKSKKGA

SEQ ID NO: 24592 - protein, 70 aa, Synthetic construct
LIKPKTCCANCQTTTTTLWRRNANGDPVCNACGLYYKLHNVNRPLTMKKEGIQTRNRKMSNKSKKSKKGA

SEQ ID NO: 24593 - protein, 70 aa, Synthetic construct
PTGIEGNWGRLLEQVGTMALWASQREKEVLRRERAVEWRERAVEKRERALEEVERAILEMKWKVRAEKEA

SEQ ID NO: 24594 - protein, 70 aa, Synthetic construct
QDPRPGNWGRLLEQVGTMALWASQREKEVLRRERAVEWRERAVEKRERALEEVERAILEMKWKVRAEKEA

SEQ ID NO: 24595 - protein, 70 aa, Synthetic construct
QDPRPHGPQLPTGIEGNWGRLLEQVGTMALWASQREKEVLRRERAVEWREEEVERAILEMKWKVRAEKEA

SEQ ID NO: 24596 - protein, 70 aa, Synthetic construct
QDPRPHGPQLPTGIEGNWGRLLEQVGTMALWASQREKEVLRRERAVEWRERAVEKAILEMKWKVRAEKEA

SEQ ID NO: 24597 - protein, 70 aa, Synthetic construct
QDPRPHGPQLPTGIEGNWGRLLEQVGTMALWASQREKEVLRRERAVEWRERAVEKRERALKWKVRAEKEA

SEQ ID NO: 24598 - protein, 70 aa, Synthetic construct
QDPRPHGPQLPTGIEGNWGRLLEQVGTMALWASQREKEVLRRERAVEWRERAVEKRERALEEVERAEKEA

SEQ ID NO: 24599 - protein, 70 aa, Synthetic construct
QDPRPHGPQLPTGIEGNWGRLLEQVGTMALWASQREKEVLRRERAVEWRERAVEKRERALEEVERAILEM

SEQ ID NO: 24600 - protein, 70 aa, Synthetic construct
ALPQGLLTFRDVAIEFSQEEWKCLDPAQRTLYRDVMLENYKCMMEFSSIGKGNTEVIHTGTLQRLASHHI

SEQ ID NO: 24601 - protein, 70 aa, Synthetic construct
ALPQGLLTFRDVAIEFSQEEWKCLDPAQRTLYRDVMLENYRNLVSFSSIGKGNTEVIHTGTLQRLASHHI

SEQ ID NO: 24602 - protein, 70 aa, Synthetic construct
ALPQGLLTFRDVAIEFSQEEWKCLDPAQRTLYRDVMLENYRNLVSLDISSKGNTEVIHTGTLQRLASHHI

SEQ ID NO: 24603 - protein, 70 aa, Synthetic construct
ALPQGLLTFRDVAIEFSQEEWKCLDPAQRTLYRDVMLENYRNLVSLDISSKCMMEVIHTGTLQRLASHHI

SEQ ID NO: 24604 - protein, 70 aa, Synthetic construct
ALPQGLLTFRDVAIEFSQEEWKCLDPAQRTLYRDVMLENYRNLVSLDISSKCMMEFSSIGTLQRLASHHI

SEQ ID NO: 24605 - protein, 70 aa, Synthetic construct
ALPQGLLTFRDVAIEFSQEEWKCLDPAQRTLYRDVMLENYRNLVSLDISSKCMMEFSSIGKGNTEASHHI

SEQ ID NO: 24606 - protein, 70 aa, Synthetic construct
ALPQGLLTFRDVAIEFSQEEWKCLDPAQRTLYRDVMLENYRNLVSLDISSKCMMEFSSIGKGNTEVIHTG

SEQ ID NO: 24607 - protein, 70 aa, Synthetic construct
TQSCQELFRQQFRKFCYQETPGPREALSRLQELCYQWLMPELHTKEQILELLVLEQFLSILPEELSGEEA

SEQ ID NO: 24608 - protein, 70 aa, Synthetic construct
TQSCQELFRQQFRKFCYQETPGPREALSRLQELCYQWLMPELHTKEQILELLVLEQFLSILPEELQIWVQ

SEQ ID NO: 24609 - protein, 70 aa, Synthetic construct
MQRPLGSSTAFSIDSLIGSPPQPSPGHFVYTGYPMFMPYRPPALPQAALQPALPPAHPHHQIPSLPTGFC

SEQ ID NO: 24610 - protein, 70 aa, Synthetic construct
MQRPLGSSTAFSIDSLIGSPPQPSPGHFVYTGYPMFMPYRPVVLPQAALQPALPPAHPHHQIPSLPTGFC

SEQ ID NO: 24611 - protein, 70 aa, Synthetic construct
MQRPLGSSTAFSIDSLIGSPPQPSPGHFVYTGYPMFMPYRPVVLPPPPPPPALPPAHPHHQIPSLPTGFC

SEQ ID NO: 24612 - protein, 70 aa, Synthetic construct
MQRPLGSSTAFSIDSLIGSPPQPSPGHFVYTGYPMFMPYRPVVLPPPPPPPPALPAHPHHQIPSLPTGFC

SEQ ID NO: 24613 - protein, 70 aa, Synthetic construct
MQRPLGSSTAFSIDSLIGSPPQPSPGHFVYTGYPMFMPYRPVVLPPPPPPPPALPQAALQQIPSLPTGFC

SEQ ID NO: 24614 - protein, 70 aa, Synthetic construct
MQRPLGSSTAFSIDSLIGSPPQPSPGHFVYTGYPMFMPYRPVVLPPPPPPPPALPQAALQPALPPPTGFC

SEQ ID NO: 24615 - protein, 70 aa, Synthetic construct
MQRPLGSSTAFSIDSLIGSPPQPSPGHFVYTGYPMFMPYRPVVLPPPPPPPPALPQAALQPALPPAHPHH

SEQ ID NO: 24616 - protein, 70 aa, Synthetic construct
WQNSYTHCGPCASLVTCPICHAPYVEEDLLIQCRHCERWMHAGCESLFTEDDVEQAADEGFDCVSCQPYV

SEQ ID NO: 24617 - protein, 70 aa, Synthetic construct
GAASPTHCGPCASLVTCPICHAPYVEEDLLIQCRHCERWMHAGCESLFTEDDVEQAADEGFDCVSCQPYV

SEQ ID NO: 24618 - protein, 70 aa, Synthetic construct
GAASPGFHCECASLVTCPICHAPYVEEDLLIQCRHCERWMHAGCESLFTEDDVEQAADEGFDCVSCQPYV

SEQ ID NO: 24619 - protein, 70 aa, Synthetic construct
GAASPGFHCEWQNSYTCPICHAPYVEEDLLIQCRHCERWMHAGCESLFTEDDVEQAADEGFDCVSCQPYV

SEQ ID NO: 24620 - protein, 70 aa, Synthetic construct
GAASPGFHCEWQNSYTHCGPHAPYVEEDLLIQCRHCERWMHAGCESLFTEDDVEQAADEGFDCVSCQPYV

SEQ ID NO: 24621 - protein, 70 aa, Synthetic construct
GAASPGFHCEWQNSYTHCGPCASLVEEDLLIQCRHCERWMHAGCESLFTEDDVEQAADEGFDCVSCQPYV

SEQ ID NO: 24622 - protein, 70 aa, Synthetic construct
GAASPGFHCEWQNSYTHCGPCASLVTCPICIQCRHCERWMHAGCESLFTEDDVEQAADEGFDCVSCQPYV

SEQ ID NO: 24623 - protein, 70 aa, Synthetic construct
GAASPGFHCEWQNSYTHCGPCASLVTCPICHAPYVCERWMHAGCESLFTEDDVEQAADEGFDCVSCQPYV

SEQ ID NO: 24624 - protein, 70 aa, Synthetic construct
GAASPGFHCEWQNSYTHCGPCASLVTCPICHAPYVEEDLLHAGCESLFTEDDVEQAADEGFDCVSCQPYV

SEQ ID NO: 24625 - protein, 70 aa, Synthetic construct
GAASPGFHCEWQNSYTHCGPCASLVTCPICHAPYVEEDLLIQCRHSLFTEDDVEQAADEGFDCVSCQPYV

SEQ ID NO: 24626 - protein, 70 aa, Synthetic construct
GAASPGFHCEWQNSYTHCGPCASLVTCPICHAPYVEEDLLIQCRHCERWMDDVEQAADEGFDCVSCQPYV

SEQ ID NO: 24627 - protein, 70 aa, Synthetic construct
GAASPGFHCEWQNSYTHCGPCASLVTCPICHAPYVEEDLLIQCRHCERWMHAGCEAADEGFDCVSCQPYV

SEQ ID NO: 24628 - protein, 70 aa, Synthetic construct
GAASPGFHCEWQNSYTHCGPCASLVTCPICHAPYVEEDLLIQCRHCERWMHAGCESLFTEFDCVSCQPYV

SEQ ID NO: 24629 - protein, 70 aa, Synthetic construct
GAASPGFHCEWQNSYTHCGPCASLVTCPICHAPYVEEDLLIQCRHCERWMHAGCESLFTEDDVEQCQPYV

SEQ ID NO: 24630 - protein, 70 aa, Synthetic construct
GAASPGFHCEWQNSYTHCGPCASLVTCPICHAPYVEEDLLIQCRHCERWMHAGCESLFTEDDVEQAADEG

SEQ ID NO: 24631 - protein, 70 aa, Synthetic construct
LNTGSFNFLSNTGAASCQGATLPPNSPNGYYGSNINYPESHRLGSMVNQHVSVISSIRSLPPYSDIHDPL

SEQ ID NO: 24632 - protein, 70 aa, Synthetic construct
QAQDSFNFLSNTGAASCQGATLPPNSPNGYYGSNINYPESHRLGSMVNQHVSVISSIRSLPPYSDIHDPL

SEQ ID NO: 24633 - protein, 70 aa, Synthetic construct
QAQDSHNMQFNTGAASCQGATLPPNSPNGYYGSNINYPESHRLGSMVNQHVSVISSIRSLPPYSDIHDPL

SEQ ID NO: 24634 - protein, 70 aa, Synthetic construct
QAQDSHNMQFLNTGSSCQGATLPPNSPNGYYGSNINYPESHRLGSMVNQHVSVISSIRSLPPYSDIHDPL

SEQ ID NO: 24635 - protein, 70 aa, Synthetic construct
QAQDSHNMQFLNTGSFNFLSTLPPNSPNGYYGSNINYPESHRLGSMVNQHVSVISSIRSLPPYSDIHDPL

SEQ ID NO: 24636 - protein, 70 aa, Synthetic construct
QAQDSHNMQFLNTGSFNFLSNTGAASPNGYYGSNINYPESHRLGSMVNQHVSVISSIRSLPPYSDIHDPL

SEQ ID NO: 24637 - protein, 70 aa, Synthetic construct
QAQDSHNMQFLNTGSFNFLSNTGAASCQGAYGSNINYPESHRLGSMVNQHVSVISSIRSLPPYSDIHDPL

SEQ ID NO: 24638 - protein, 70 aa, Synthetic construct
QAQDSHNMQFLNTGSFNFLSNTGAASCQGATLPPNNYPESHRLGSMVNQHVSVISSIRSLPPYSDIHDPL

SEQ ID NO: 24639 - protein, 70 aa, Synthetic construct
QAQDSHNMQFLNTGSFNFLSNTGAASCQGATLPPNSPNGYHRLGSMVNQHVSVISSIRSLPPYSDIHDPL

SEQ ID NO: 24640 - protein, 70 aa, Synthetic construct
QAQDSHNMQFLNTGSFNFLSNTGAASCQGATLPPNSPNGYYGSNIMVNQHVSVISSIRSLPPYSDIHDPL

SEQ ID NO: 24641 - protein, 70 aa, Synthetic construct
QAQDSHNMQFLNTGSFNFLSNTGAASCQGATLPPNSPNGYYGSNINYPESHRLGSMVNQHVSVISSIRSL

SEQ ID NO: 24642 - protein, 70 aa, Synthetic construct
YGSNINYPESHRLGSMVNQHVSVISSIRSLPPYSDIHDPLNILDDSGRKQTSSFYTDTSSPVACRTPVLA

SEQ ID NO: 24643 - protein, 70 aa, Synthetic construct
TLPPNNYPESHRLGSMVNQHVSVISSIRSLPPYSDIHDPLNILDDSGRKQTSSFYTDTSSPVACRTPVLA

SEQ ID NO: 24644 - protein, 70 aa, Synthetic construct
TLPPNSPNGYHRLGSMVNQHVSVISSIRSLPPYSDIHDPLNILDDSGRKQTSSFYTDTSSPVACRTPVLA

SEQ ID NO: 24645 - protein, 70 aa, Synthetic construct
TLPPNSPNGYYGSNIMVNQHVSVISSIRSLPPYSDIHDPLNILDDSGRKQTSSFYTDTSSPVACRTPVLA

SEQ ID NO: 24646 - protein, 70 aa, Synthetic construct
TLPPNSPNGYYGSNINYPESHRLGSMVNQHVSVISSIRSLPPYSDSGRKQTSSFYTDTSSPVACRTPVLA

SEQ ID NO: 24647 - protein, 70 aa, Synthetic construct
TLPPNSPNGYYGSNINYPESHRLGSMVNQHVSVISSIRSLPPYSDIHDPLTSSFYTDTSSPVACRTPVLA

SEQ ID NO: 24648 - protein, 70 aa, Synthetic construct
TLPPNSPNGYYGSNINYPESHRLGSMVNQHVSVISSIRSLPPYSDIHDPLNILDDSGRKQPVACRTPVLA

SEQ ID NO: 24649 - protein, 70 aa, Synthetic construct
TLPPNSPNGYYGSNINYPESHRLGSMVNQHVSVISSIRSLPPYSDIHDPLNILDDSGRKQTSSFYTPVLA

SEQ ID NO: 24650 - protein, 70 aa, Synthetic construct
EEGHDNQEAHQKYETMQCFAVSQPKSIKEEGEDLQSCLICVARRVPMKERPVLPSSESFTTRQDLQGKIT

SEQ ID NO: 24651 - protein, 70 aa, Synthetic construct
MLVKPNQEAHQKYETMQCFAVSQPKSIKEEGEDLQSCLICVARRVPMKERPVLPSSESFTTRQDLQGKIT

SEQ ID NO: 24652 - protein, 70 aa, Synthetic construct
MLVKPLPDSEQKYETMQCFAVSQPKSIKEEGEDLQSCLICVARRVPMKERPVLPSSESFTTRQDLQGKIT

SEQ ID NO: 24653 - protein, 70 aa, Synthetic construct
MLVKPLPDSEEEGHDMQCFAVSQPKSIKEEGEDLQSCLICVARRVPMKERPVLPSSESFTTRQDLQGKIT

SEQ ID NO: 24654 - protein, 70 aa, Synthetic construct
MLVKPLPDSEEEGHDNQEAHVSQPKSIKEEGEDLQSCLICVARRVPMKERPVLPSSESFTTRQDLQGKIT

SEQ ID NO: 24655 - protein, 70 aa, Synthetic construct
MLVKPLPDSEEEGHDNQEAHQKYETSIKEEGEDLQSCLICVARRVPMKERPVLPSSESFTTRQDLQGKIT

SEQ ID NO: 24656 - protein, 70 aa, Synthetic construct
MLVKPLPDSEEEGHDNQEAHQKYETMQCFAVSQPKSIKEEGEDLQPMKERPVLPSSESFTTRQDLQGKIT

SEQ ID NO: 24657 - protein, 70 aa, Synthetic construct
MLVKPLPDSEEEGHDNQEAHQKYETMQCFAVSQPKSIKEEGEDLQSCLICPVLPSSESFTTRQDLQGKIT

SEQ ID NO: 24658 - protein, 70 aa, Synthetic construct
MLVKPLPDSEEEGHDNQEAHQKYETMQCFAVSQPKSIKEEGEDLQSCLICVARRVSESFTTRQDLQGKIT

SEQ ID NO: 24659 - protein, 70 aa, Synthetic construct
MLVKPLPDSEEEGHDNQEAHQKYETMQCFAVSQPKSIKEEGEDLQSCLICVARRVPMKERTRQDLQGKIT

SEQ ID NO: 24660 - protein, 70 aa, Synthetic construct
MLVKPLPDSEEEGHDNQEAHQKYETMQCFAVSQPKSIKEEGEDLQSCLICVARRVPMKERPVLPSQGKIT

SEQ ID NO: 24661 - protein, 70 aa, Synthetic construct
MLVKPLPDSEEEGHDNQEAHQKYETMQCFAVSQPKSIKEEGEDLQSCLICVARRVPMKERPVLPSSESFT

SEQ ID NO: 24662 - protein, 70 aa, Synthetic construct
DLAKLTAEATGKDLSQESSSTAPGSEVTIKQEPVSPKKKENALLRYLLDKDDTKDIGLPEITPKLERLDS

SEQ ID NO: 24663 - protein, 70 aa, Synthetic construct
RLLQDTAEATGKDLSQESSSTAPGSEVTIKQEPVSPKKKENALLRYLLDKDDTKDIGLPEITPKLERLDS

SEQ ID NO: 24664 - protein, 70 aa, Synthetic construct
RLLQDSSSPVGKDLSQESSSTAPGSEVTIKQEPVSPKKKENALLRYLLDKDDTKDIGLPEITPKLERLDS

SEQ ID NO: 24665 - protein, 70 aa, Synthetic construct
RLLQDSSSPVDLAKLQESSSTAPGSEVTIKQEPVSPKKKENALLRYLLDKDDTKDIGLPEITPKLERLDS

SEQ ID NO: 24666 - protein, 70 aa, Synthetic construct
RLLQDSSSPVDLAKLTAEATTAPGSEVTIKQEPVSPKKKENALLRYLLDKDDTKDIGLPEITPKLERLDS

SEQ ID NO: 24667 - protein, 70 aa, Synthetic construct
RLLQDSSSPVDLAKLTAEATGKDLSEVTIKQEPVSPKKKENALLRYLLDKDDTKDIGLPEITPKLERLDS

SEQ ID NO: 24668 - protein, 70 aa, Synthetic construct
RLLQDSSSPVDLAKLTAEATGKDLSQESSSTAPGSEVTIKQEPVSYLLDKDDTKDIGLPEITPKLERLDS

SEQ ID NO: 24669 - protein, 70 aa, Synthetic construct
RLLQDSSSPVDLAKLTAEATGKDLSQESSSTAPGSEVTIKQEPVSPKKKEDDTKDIGLPEITPKLERLDS

SEQ ID NO: 24670 - protein, 70 aa, Synthetic construct
RLLQDSSSPVDLAKLTAEATGKDLSQESSSTAPGSEVTIKQEPVSPKKKENALLRIGLPEITPKLERLDS

SEQ ID NO: 24671 - protein, 70 aa, Synthetic construct
RLLQDSSSPVDLAKLTAEATGKDLSQESSSTAPGSEVTIKQEPVSPKKKENALLRYLLDKITPKLERLDS

SEQ ID NO: 24672 - protein, 70 aa, Synthetic construct
RLLQDSSSPVDLAKLTAEATGKDLSQESSSTAPGSEVTIKQEPVSPKKKENALLRYLLDKDDTKDERLDS

SEQ ID NO: 24673 - protein, 70 aa, Synthetic construct
RLLQDSSSPVDLAKLTAEATGKDLSQESSSTAPGSEVTIKQEPVSPKKKENALLRYLLDKDDTKDIGLPE

SEQ ID NO: 24674 - protein, 70 aa, Synthetic construct
HRRIKKLKTEKVDPLFTVPAPPPPISSSLTPQILPSYFSPSSSNIAAPVEQLLVRTRSVGVNTCEVGVVT

SEQ ID NO: 24675 - protein, 70 aa, Synthetic construct
VKKEEKLKTEKVDPLFTVPAPPPPISSSLTPQILPSYFSPSSSNIAAPVEQLLVRTRSVGVNTCEVGVVT

SEQ ID NO: 24676 - protein, 70 aa, Synthetic construct
VKKEEEEEESKVDPLFTVPAPPPPISSSLTPQILPSYFSPSSSNIAAPVEQLLVRTRSVGVNTCEVGVVT

SEQ ID NO: 24677 - protein, 70 aa, Synthetic construct
VKKEEEEEESHRRIKFTVPAPPPPISSSLTPQILPSYFSPSSSNIAAPVEQLLVRTRSVGVNTCEVGVVT

SEQ ID NO: 24678 - protein, 70 aa, Synthetic construct
VKKEEEEEESHRRIKKLKTEPPPPISSSLTPQILPSYFSPSSSNIAAPVEQLLVRTRSVGVNTCEVGVVT

SEQ ID NO: 24679 - protein, 70 aa, Synthetic construct
VKKEEEEEESHRRIKKLKTEKVDPLSSSLTPQILPSYFSPSSSNIAAPVEQLLVRTRSVGVNTCEVGVVT

SEQ ID NO: 24680 - protein, 70 aa, Synthetic construct
VKKEEEEEESHRRIKKLKTEKVDPLFTVPAPQILPSYFSPSSSNIAAPVEQLLVRTRSVGVNTCEVGVVT

SEQ ID NO: 24681 - protein, 70 aa, Synthetic construct
VKKEEEEEESHRRIKKLKTEKVDPLFTVPAPPPPISYFSPSSSNIAAPVEQLLVRTRSVGVNTCEVGVVT

SEQ ID NO: 24682 - protein, 70 aa, Synthetic construct
VKKEEEEEESHRRIKKLKTEKVDPLFTVPAPPPPISSSLTSSSNIAAPVEQLLVRTRSVGVNTCEVGVVT

SEQ ID NO: 24683 - protein, 70 aa, Synthetic construct
VKKEEEEEESHRRIKKLKTEKVDPLFTVPAPPPPISSSLTPQILPAAPVEQLLVRTRSVGVNTCEVGVVT

SEQ ID NO: 24684 - protein, 70 aa, Synthetic construct
VKKEEEEEESHRRIKKLKTEKVDPLFTVPAPPPPISSSLTPQILPSYFSPQLLVRTRSVGVNTCEVGVVT

SEQ ID NO: 24685 - protein, 70 aa, Synthetic construct
VKKEEEEEESHRRIKKLKTEKVDPLFTVPAPPPPISSSLTPQILPSYFSPSSSNITRSVGVNTCEVGVVT

SEQ ID NO: 24686 - protein, 70 aa, Synthetic construct
VKKEEEEEESHRRIKKLKTEKVDPLFTVPAPPPPISSSLTPQILPSYFSPSSSNIAAPVEVNTCEVGVVT

SEQ ID NO: 24687 - protein, 70 aa, Synthetic construct
VKKEEEEEESHRRIKKLKTEKVDPLFTVPAPPPPISSSLTPQILPSYFSPSSSNIAAPVEQLLVRVGVVT

SEQ ID NO: 24688 - protein, 70 aa, Synthetic construct
VKKEEEEEESHRRIKKLKTEKVDPLFTVPAPPPPISSSLTPQILPSYFSPSSSNIAAPVEQLLVRTRSVG

SEQ ID NO: 24689 - protein, 70 aa, Synthetic construct
WHETEEGVLVVNVTWRNKTYVGTLLRFCESPTSDLEMRGGRGRGKRARSAAAAPGSEASFTESRGLQNKN

SEQ ID NO: 24690 - protein, 70 aa, Synthetic construct
WHETEEGVLVVNVTWRNKTYVGTLLDCTKHPTSDLEMRGGRGRGKRARSAAAAPGSEASFTESRGLQNKN

SEQ ID NO: 24691 - protein, 70 aa, Synthetic construct
WHETEEGVLVVNVTWRNKTYVGTLLDCTKHDWAPPEMRGGRGRGKRARSAAAAPGSEASFTESRGLQNKN

SEQ ID NO: 24692 - protein, 70 aa, Synthetic construct
WHETEEGVLVVNVTWRNKTYVGTLLDCTKHDWAPPRFCESRGRGKRARSAAAAPGSEASFTESRGLQNKN

SEQ ID NO: 24693 - protein, 70 aa, Synthetic construct
WHETEEGVLVVNVTWRNKTYVGTLLDCTKHDWAPPRFCESPTSDLRARSAAAAPGSEASFTESRGLQNKN

SEQ ID NO: 24694 - protein, 70 aa, Synthetic construct
WHETEEGVLVVNVTWRNKTYVGTLLDCTKHDWAPPRFCESPTSDLEMRGGAAAPGSEASFTESRGLQNKN

SEQ ID NO: 24695 - protein, 70 aa, Synthetic construct
WHETEEGVLVVNVTWRNKTYVGTLLDCTKHDWAPPRFCESPTSDLEMRGGRGRGKSEASFTESRGLQNKN

SEQ ID NO: 24696 - protein, 70 aa, Synthetic construct
WHETEEGVLVVNVTWRNKTYVGTLLDCTKHDWAPPRFCESPTSDLEMRGGRGRGKRARSATESRGLQNKN

SEQ ID NO: 24697 - protein, 70 aa, Synthetic construct
WHETEEGVLVVNVTWRNKTYVGTLLDCTKHDWAPPRFCESPTSDLEMRGGRGRGKRARSAAAAPGLQNKN

SEQ ID NO: 24698 - protein, 70 aa, Synthetic construct
WHETEEGVLVVNVTWRNKTYVGTLLDCTKHDWAPPRFCESPTSDLEMRGGRGRGKRARSAAAAPGSEASF

SEQ ID NO: 24699 - protein, 70 aa, Synthetic construct
SGSTQGMKIKKESEELDSKKVDHNSASLQPQHQSVITQRHPALAQSLYYGQYAYGLYMDQKSLMATSPAY

SEQ ID NO: 24700 - protein, 70 aa, Synthetic construct
SGSTQGMKIKKESEEDAEKKVDHNSASLQPQHQSVITQRHPALAQSLYYGQYAYGLYMDQKSLMATSPAY

SEQ ID NO: 24701 - protein, 70 aa, Synthetic construct
SGSTQGMKIKKESEEDAEKKDKAEQASLQPQHQSVITQRHPALAQSLYYGQYAYGLYMDQKSLMATSPAY

SEQ ID NO: 24702 - protein, 70 aa, Synthetic construct
SGSTQGMKIKKESEEDAEKKDKAEQLDSKKQHQSVITQRHPALAQSLYYGQYAYGLYMDQKSLMATSPAY

SEQ ID NO: 24703 - protein, 70 aa, Synthetic construct
SGSTQGMKIKKESEEDAEKKDKAEQLDSKKVDHNSITQRHPALAQSLYYGQYAYGLYMDQKSLMATSPAY

SEQ ID NO: 24704 - protein, 70 aa, Synthetic construct
SGSTQGMKIKKESEEDAEKKDKAEQLDSKKVDHNSASLQPPALAQSLYYGQYAYGLYMDQKSLMATSPAY

SEQ ID NO: 24705 - protein, 70 aa, Synthetic construct
SGSTQGMKIKKESEEDAEKKDKAEQLDSKKVDHNSASLQPQHQSVSLYYGQYAYGLYMDQKSLMATSPAY

SEQ ID NO: 24706 - protein, 70 aa, Synthetic construct
SGSTQGMKIKKESEEDAEKKDKAEQLDSKKVDHNSASLQPQHQSVITQRHQYAYGLYMDQKSLMATSPAY

SEQ ID NO: 24707 - protein, 70 aa, Synthetic construct
SGSTQGMKIKKESEEDAEKKDKAEQLDSKKVDHNSASLQPQHQSVITQRHPALAQLYMDQKSLMATSPAY

SEQ ID NO: 24708 - protein, 70 aa, Synthetic construct
SGSTQGMKIKKESEEDAEKKDKAEQLDSKKVDHNSASLQPQHQSVITQRHPALAQSLYYGKSLMATSPAY

SEQ ID NO: 24709 - protein, 70 aa, Synthetic construct
SGSTQGMKIKKESEEDAEKKDKAEQLDSKKVDHNSASLQPQHQSVITQRHPALAQSLYYGQYAYGTSPAY

SEQ ID NO: 24710 - protein, 70 aa, Synthetic construct
SGSTQGMKIKKESEEDAEKKDKAEQLDSKKVDHNSASLQPQHQSVITQRHPALAQSLYYGQYAYGLYMDQ

SEQ ID NO: 24711 - protein, 70 aa, Synthetic construct
WKDSRGTRVAVSSPMSQHQSYIQYLHAYPYPQMYDPSHPAYRAVSPVLMHSYPGAYLSPGFHYPVYGKMS

SEQ ID NO: 24712 - protein, 70 aa, Synthetic construct
KNDDRGTRVAVSSPMSQHQSYIQYLHAYPYPQMYDPSHPAYRAVSPVLMHSYPGAYLSPGFHYPVYGKMS

SEQ ID NO: 24713 - protein, 70 aa, Synthetic construct
KNDDRKTPVNVSSPMSQHQSYIQYLHAYPYPQMYDPSHPAYRAVSPVLMHSYPGAYLSPGFHYPVYGKMS

SEQ ID NO: 24714 - protein, 70 aa, Synthetic construct
KNDDRKTPVNWKDSRSQHQSYIQYLHAYPYPQMYDPSHPAYRAVSPVLMHSYPGAYLSPGFHYPVYGKMS

SEQ ID NO: 24715 - protein, 70 aa, Synthetic construct
KNDDRKTPVNWKDSRGTRVAYIQYLHAYPYPQMYDPSHPAYRAVSPVLMHSYPGAYLSPGFHYPVYGKMS

SEQ ID NO: 24716 - protein, 70 aa, Synthetic construct
KNDDRKTPVNWKDSRGTRVAVSSPMSQHQSYIQYLPSHPAYRAVSPVLMHSYPGAYLSPGFHYPVYGKMS

SEQ ID NO: 24717 - protein, 70 aa, Synthetic construct
KNDDRKTPVNWKDSRGTRVAVSSPMSQHQSYIQYLHAYPYYRAVSPVLMHSYPGAYLSPGFHYPVYGKMS

SEQ ID NO: 24718 - protein, 70 aa, Synthetic construct
KNDDRKTPVNWKDSRGTRVAVSSPMSQHQSYIQYLHAYPYPQMYDPVLMHSYPGAYLSPGFHYPVYGKMS

SEQ ID NO: 24719 - protein, 70 aa, Synthetic construct
KNDDRKTPVNWKDSRGTRVAVSSPMSQHQSYIQYLHAYPYPQMYDPSHPASYPGAYLSPGFHYPVYGKMS

SEQ ID NO: 24720 - protein, 70 aa, Synthetic construct
KNDDRKTPVNWKDSRGTRVAVSSPMSQHQSYIQYLHAYPYPQMYDPSHPAYRAVSPVLMHFHYPVYGKMS

SEQ ID NO: 24721 - protein, 70 aa, Synthetic construct
QKSELEREVDKLARENAAMRLELDALRGKCEALQGFARSVAAARGPATLVAPASVITIVKSTPGSGSGPA

SEQ ID NO: 24722 - protein, 70 aa, Synthetic construct
RVCQKEREVDKLARENAAMRLELDALRGKCEALQGFARSVAAARGPATLVAPASVITIVKSTPGSGSGPA

SEQ ID NO: 24723 - protein, 70 aa, Synthetic construct
RVCQKEELQKKLARENAAMRLELDALRGKCEALQGFARSVAAARGPATLVAPASVITIVKSTPGSGSGPA

SEQ ID NO: 24724 - protein, 70 aa, Synthetic construct
RVCQKEELQKQKSELEREVDKLARENAAMREALQGFARSVAAARGPATLVAPASVITIVKSTPGSGSGPA

SEQ ID NO: 24725 - protein, 70 aa, Synthetic construct
RVCQKEELQKQKSELEREVDKLARENAAMRLELDALRGKCEALQGFARSVAAARGPATLVAPASVITIVK

SEQ ID NO: 24726 - protein, 70 aa, Synthetic construct
HPATTRGDRKQKKRDQNKSAALRYRQRKRAEGEALNRELKERAESVEREIQYVKDLLIEVYKARSQRTRS

SEQ ID NO: 24727 - protein, 70 aa, Synthetic construct
PKKKHRRNRTTFTTYQLHELERAFEKSHYPDVYSREELAGKVNLPEVRVQVWFQNRRAKWRRQEKLEVSS

SEQ ID NO: 24728 - protein, 70 aa, Synthetic construct
GEAKLSEEEQPKKKHRRNRTTFTTYKSHYPDVYSREELAGKVNLPEVRVQVWFQNRRAKWRRQEKLEVSS

SEQ ID NO: 24729 - protein, 70 aa, Synthetic construct
GEAKLSEEEQPKKKHRRNRTTFTTYQLHELDVYSREELAGKVNLPEVRVQVWFQNRRAKWRRQEKLEVSS

SEQ ID NO: 24730 - protein, 70 aa, Synthetic construct
MDYRLMWEVRGSKGEVLYILDATNPRHSNWLRFVHEAPSQEQKNLAAIQEGENIFYLAVEDIETDTELLI

SEQ ID NO: 24731 - protein, 70 aa, Synthetic construct
KRMPEMWEVRGSKGEVLYILDATNPRHSNWLRFVHEAPSQEQKNLAAIQEGENIFYLAVEDIETDTELLI

SEQ ID NO: 24732 - protein, 70 aa, Synthetic construct
KRMPEDLDENGSKGEVLYILDATNPRHSNWLRFVHEAPSQEQKNLAAIQEGENIFYLAVEDIETDTELLI

SEQ ID NO: 24733 - protein, 70 aa, Synthetic construct
KRMPEDLDENMDYRLVLYILDATNPRHSNWLRFVHEAPSQEQKNLAAIQEGENIFYLAVEDIETDTELLI

SEQ ID NO: 24734 - protein, 70 aa, Synthetic construct
KRMPEDLDENMDYRLMWEVRDATNPRHSNWLRFVHEAPSQEQKNLAAIQEGENIFYLAVEDIETDTELLI

SEQ ID NO: 24735 - protein, 70 aa, Synthetic construct
KRMPEDLDENMDYRLMWEVRGSKGEVLYILLRFVHEAPSQEQKNLAAIQEGENIFYLAVEDIETDTELLI

SEQ ID NO: 24736 - protein, 70 aa, Synthetic construct
KRMPEDLDENMDYRLMWEVRGSKGEVLYILDATNPEAPSQEQKNLAAIQEGENIFYLAVEDIETDTELLI

SEQ ID NO: 24737 - protein, 70 aa, Synthetic construct
KRMPEDLDENMDYRLMWEVRGSKGEVLYILDATNPRHSNWEQKNLAAIQEGENIFYLAVEDIETDTELLI

SEQ ID NO: 24738 - protein, 70 aa, Synthetic construct
KRMPEDLDENMDYRLMWEVRGSKGEVLYILDATNPRHSNWLRFVHAAIQEGENIFYLAVEDIETDTELLI

SEQ ID NO: 24739 - protein, 70 aa, Synthetic construct
KRMPEDLDENMDYRLMWEVRGSKGEVLYILDATNPRHSNWLRFVHEAPSQGENIFYLAVEDIETDTELLI

SEQ ID NO: 24740 - protein, 70 aa, Synthetic construct
KRMPEDLDENMDYRLMWEVRGSKGEVLYILDATNPRHSNWLRFVHEAPSQEQKNLAAIQEGENIFTELLI

SEQ ID NO: 24741 - protein, 70 aa, Synthetic construct
YKGFFQLMCSKSCCVYFHKICWKKFKNLKYPGENDQSFSGKKCLKEGCTGDMVRMLQCDVPGIVKILFEV

SEQ ID NO: 24742 - protein, 70 aa, Synthetic construct
CEADIQLMCSKSCCVYFHKICWKKFKNLKYPGENDQSFSGKKCLKEGCTGDMVRMLQCDVPGIVKILFEV

SEQ ID NO: 24743 - protein, 70 aa, Synthetic construct
CEADILKNTSYKGFFYFHKICWKKFKNLKYPGENDQSFSGKKCLKEGCTGDMVRMLQCDVPGIVKILFEV

SEQ ID NO: 24744 - protein, 70 aa, Synthetic construct
CEADILKNTSYKGFFQLMCSKSCCVYFHKIPGENDQSFSGKKCLKEGCTGDMVRMLQCDVPGIVKILFEV

SEQ ID NO: 24745 - protein, 70 aa, Synthetic construct
IPQLSQASRLSTQQVLDWFDSRLPQPAEVVVCLDEEEEEEEEELPEDDEEEEEEEEEDDDDDDDDVIIQD

SEQ ID NO: 24746 - protein, 70 aa, Synthetic construct
AAHQQQASRLSTQQVLDWFDSRLPQPAEVVVCLDEEEEEEEEELPEDDEEEEEEEEEDDDDDDDDVIIQD

SEQ ID NO: 24747 - protein, 70 aa, Synthetic construct
AAHQQLRETDSTQQVLDWFDSRLPQPAEVVVCLDEEEEEEEEELPEDDEEEEEEEEEDDDDDDDDVIIQD

SEQ ID NO: 24748 - protein, 70 aa, Synthetic construct
AAHQQLRETDIPQLSLDWFDSRLPQPAEVVVCLDEEEEEEEEELPEDDEEEEEEEEEDDDDDDDDVIIQD

SEQ ID NO: 24749 - protein, 70 aa, Synthetic construct
AAHQQLRETDIPQLSQASRLSRLPQPAEVVVCLDEEEEEEEEELPEDDEEEEEEEEEDDDDDDDDVIIQD

SEQ ID NO: 24750 - protein, 70 aa, Synthetic construct
AAHQQLRETDIPQLSQASRLSTQQVPAEVVVCLDEEEEEEEEELPEDDEEEEEEEEEDDDDDDDDVIIQD

SEQ ID NO: 24751 - protein, 70 aa, Synthetic construct
AAHQQLRETDIPQLSQASRLSTQQVLDWFDSRLPQPAEVVVCLDEEEEEEEEELPEDDEEEEEEEEEDDD

SEQ ID NO: 24752 - protein, 70 aa, Synthetic construct
SGQPYGQTVNPYTYHHQFNLNGLAGTGAYSPKSEYTYGASYRQYGAYREQPLPAQDPVSVKEEPEAEVRM

SEQ ID NO: 24753 - protein, 70 aa, Synthetic construct
YYSAPGQTVNPYTYHHQFNLNGLAGTGAYSPKSEYTYGASYRQYGAYREQPLPAQDPVSVKEEPEAEVRM

SEQ ID NO: 24754 - protein, 70 aa, Synthetic construct
YYSAPQHDYYPYTYHHQFNLNGLAGTGAYSPKSEYTYGASYRQYGAYREQPLPAQDPVSVKEEPEAEVRM

SEQ ID NO: 24755 - protein, 70 aa, Synthetic construct
YYSAPQHDYYSGQPYHQFNLNGLAGTGAYSPKSEYTYGASYRQYGAYREQPLPAQDPVSVKEEPEAEVRM

SEQ ID NO: 24756 - protein, 70 aa, Synthetic construct
YYSAPQHDYYSGQPYGQTVNNGLAGTGAYSPKSEYTYGASYRQYGAYREQPLPAQDPVSVKEEPEAEVRM

SEQ ID NO: 24757 - protein, 70 aa, Synthetic construct
YYSAPQHDYYSGQPYGQTVNPYTYHTGAYSPKSEYTYGASYRQYGAYREQPLPAQDPVSVKEEPEAEVRM

SEQ ID NO: 24758 - protein, 70 aa, Synthetic construct
YYSAPQHDYYSGQPYGQTVNPYTYHHQFNLPKSEYTYGASYRQYGAYREQPLPAQDPVSVKEEPEAEVRM

SEQ ID NO: 24759 - protein, 70 aa, Synthetic construct
YYSAPQHDYYSGQPYGQTVNPYTYHHQFNLNGLAGTYGASYRQYGAYREQPLPAQDPVSVKEEPEAEVRM

SEQ ID NO: 24760 - protein, 70 aa, Synthetic construct
YYSAPQHDYYSGQPYGQTVNPYTYHHQFNLNGLAGTGAYSYRQYGAYREQPLPAQDPVSVKEEPEAEVRM

SEQ ID NO: 24761 - protein, 70 aa, Synthetic construct
YYSAPQHDYYSGQPYGQTVNPYTYHHQFNLNGLAGTGAYSPKSEYAYREQPLPAQDPVSVKEEPEAEVRM

SEQ ID NO: 24762 - protein, 70 aa, Synthetic construct
YYSAPQHDYYSGQPYGQTVNPYTYHHQFNLNGLAGTGAYSPKSEYTYGASPLPAQDPVSVKEEPEAEVRM

SEQ ID NO: 24763 - protein, 70 aa, Synthetic construct
YYSAPQHDYYSGQPYGQTVNPYTYHHQFNLNGLAGTGAYSPKSEYTYGASYRQYGDPVSVKEEPEAEVRM

SEQ ID NO: 24764 - protein, 70 aa, Synthetic construct
YYSAPQHDYYSGQPYGQTVNPYTYHHQFNLNGLAGTGAYSPKSEYTYGASYRQYGAYREQKEEPEAEVRM

SEQ ID NO: 24765 - protein, 70 aa, Synthetic construct
YYSAPQHDYYSGQPYGQTVNPYTYHHQFNLNGLAGTGAYSPKSEYTYGASYRQYGAYREQPLPAQAEVRM

SEQ ID NO: 24766 - protein, 70 aa, Synthetic construct
YYSAPQHDYYSGQPYGQTVNPYTYHHQFNLNGLAGTGAYSPKSEYTYGASYRQYGAYREQPLPAQDPVSV

SEQ ID NO: 24767 - protein, 70 aa, Synthetic construct
CIATPDVEKKGLHVENVPKMVFPQPESTLSNKRKNNQGNSFQAKRARLNKITGLLASKAVGVDGAEKKED

SEQ ID NO: 24768 - protein, 70 aa, Synthetic construct
CIATPDVEKKEDLPTSSETFVFPQPESTLSNKRKNNQGNSFQAKRARLNKITGLLASKAVGVDGAEKKED

SEQ ID NO: 24769 - protein, 70 aa, Synthetic construct
CIATPDVEKKEDLPTSSETFGLHVENVPKMNKRKNNQGNSFQAKRARLNKITGLLASKAVGVDGAEKKED

SEQ ID NO: 24770 - protein, 70 aa, Synthetic construct
CIATPDVEKKEDLPTSSETFGLHVENVPKMVFPQPESTLSNKRKNNQGNSFQAKRARLNKITGLLASKAV

SEQ ID NO: 24771 - protein, 70 aa, Synthetic construct
SLLLSGDEYNQDFDSTNFEESQDEDDALNEIVRCICEMDEENGFMIQCEECLCWQHSVCMGLLEESIPEQ

SEQ ID NO: 24772 - protein, 70 aa, Synthetic construct
VDFLDGDEYNQDFDSTNFEESQDEDDALNEIVRCICEMDEENGFMIQCEECLCWQHSVCMGLLEESIPEQ

SEQ ID NO: 24773 - protein, 70 aa, Synthetic construct
VDFLDDSSTEQDFDSTNFEESQDEDDALNEIVRCICEMDEENGFMIQCEECLCWQHSVCMGLLEESIPEQ

SEQ ID NO: 24774 - protein, 70 aa, Synthetic construct
VDFLDDSSTESLLLSTNFEESQDEDDALNEIVRCICEMDEENGFMIQCEECLCWQHSVCMGLLEESIPEQ

SEQ ID NO: 24775 - protein, 70 aa, Synthetic construct
VDFLDDSSTESLLLSGDEYNSQDEDDALNEIVRCICEMDEENGFMIQCEECLCWQHSVCMGLLEESIPEQ

SEQ ID NO: 24776 - protein, 70 aa, Synthetic construct
VDFLDDSSTESLLLSGDEYNQDFDSDALNEIVRCICEMDEENGFMIQCEECLCWQHSVCMGLLEESIPEQ

SEQ ID NO: 24777 - protein, 70 aa, Synthetic construct
VDFLDDSSTESLLLSGDEYNQDFDSTNFEEIVRCICEMDEENGFMIQCEECLCWQHSVCMGLLEESIPEQ

SEQ ID NO: 24778 - protein, 70 aa, Synthetic construct
VDFLDDSSTESLLLSGDEYNQDFDSTNFEESQDEDCEMDEENGFMIQCEECLCWQHSVCMGLLEESIPEQ

SEQ ID NO: 24779 - protein, 70 aa, Synthetic construct
VDFLDDSSTESLLLSGDEYNQDFDSTNFEESQDEDDALNEENGFMIQCEECLCWQHSVCMGLLEESIPEQ

SEQ ID NO: 24780 - protein, 70 aa, Synthetic construct
VDFLDDSSTESLLLSGDEYNQDFDSTNFEESQDEDDALNEIVRCIIQCEECLCWQHSVCMGLLEESIPEQ

SEQ ID NO: 24781 - protein, 70 aa, Synthetic construct
VDFLDDSSTESLLLSGDEYNQDFDSTNFEESQDEDDALNEIVRCICEMDECLCWQHSVCMGLLEESIPEQ

SEQ ID NO: 24782 - protein, 70 aa, Synthetic construct
VDFLDDSSTESLLLSGDEYNQDFDSTNFEESQDEDDALNEIVRCICEMDEENGFMHSVCMGLLEESIPEQ

SEQ ID NO: 24783 - protein, 70 aa, Synthetic construct
VDFLDDSSTESLLLSGDEYNQDFDSTNFEESQDEDDALNEIVRCICEMDEENGFMIQCEEGLLEESIPEQ

SEQ ID NO: 24784 - protein, 70 aa, Synthetic construct
VDFLDDSSTESLLLSGDEYNQDFDSTNFEESQDEDDALNEIVRCICEMDEENGFMIQCEECLCWQSIPEQ

SEQ ID NO: 24785 - protein, 70 aa, Synthetic construct
VDFLDDSSTESLLLSGDEYNQDFDSTNFEESQDEDDALNEIVRCICEMDEENGFMIQCEECLCWQHSVCM

SEQ ID NO: 24786 - protein, 70 aa, Synthetic construct
AGRLESAARRRLAANARERRRMQGLNTAFDRLRRVVPQWGQDKKLSKYETLQMALSYIMALTRILAEAER

SEQ ID NO: 24787 - protein, 70 aa, Synthetic construct
GTECASAARRRLAANARERRRMQGLNTAFDRLRRVVPQWGQDKKLSKYETLQMALSYIMALTRILAEAER

SEQ ID NO: 24788 - protein, 70 aa, Synthetic construct
GTECAGTCAGRLAANARERRRMQGLNTAFDRLRRVVPQWGQDKKLSKYETLQMALSYIMALTRILAEAER

SEQ ID NO: 24789 - protein, 70 aa, Synthetic construct
GTECAGTCAGAGRLEARERRRMQGLNTAFDRLRRVVPQWGQDKKLSKYETLQMALSYIMALTRILAEAER

SEQ ID NO: 24790 - protein, 70 aa, Synthetic construct
GTECAGTCAGAGRLESAARRRMQGLNTAFDRLRRVVPQWGQDKKLSKYETLQMALSYIMALTRILAEAER

SEQ ID NO: 24791 - protein, 70 aa, Synthetic construct
GTECAGTCAGAGRLESAARRRLAANARERRRLRRVVPQWGQDKKLSKYETLQMALSYIMALTRILAEAER

SEQ ID NO: 24792 - protein, 70 aa, Synthetic construct
GTECAGTCAGAGRLESAARRRLAANARERRRMQGLNTAFDQDKKLSKYETLQMALSYIMALTRILAEAER

SEQ ID NO: 24793 - protein, 70 aa, Synthetic construct
DNGRVNLRPVVQLIDIMKDLGVHLDCGGLRLSRPPAPPPGDLQYSFFSSPSLANSIRSPEERATPHAKSE

SEQ ID NO: 24794 - protein, 70 aa, Synthetic construct
DNGRVNLRPVVQLIDIMKDLTRLSQCGGLRLSRPPAPPPGDLQYSFFSSPSLANSIRSPEERATPHAKSE

SEQ ID NO: 24795 - protein, 70 aa, Synthetic construct
DNGRVNLRPVVQLIDIMKDLTRLSQDLQHSGVHLDAPPPGDLQYSFFSSPSLANSIRSPEERATPHAKSE

SEQ ID NO: 24796 - protein, 70 aa, Synthetic construct
DNGRVNLRPVVQLIDIMKDLTRLSQDLQHSGVHLDCGGLRDLQYSFFSSPSLANSIRSPEERATPHAKSE

SEQ ID NO: 24797 - protein, 70 aa, Synthetic construct
DNGRVNLRPVVQLIDIMKDLTRLSQDLQHSGVHLDCGGLRLSRPPFFSSPSLANSIRSPEERATPHAKSE

SEQ ID NO: 24798 - protein, 70 aa, Synthetic construct
DNGRVNLRPVVQLIDIMKDLTRLSQDLQHSGVHLDCGGLRLSRPPAPPPGSLANSIRSPEERATPHAKSE

SEQ ID NO: 24799 - protein, 70 aa, Synthetic construct
DNGRVNLRPVVQLIDIMKDLTRLSQDLQHSGVHLDCGGLRLSRPPAPPPGDLQYSIRSPEERATPHAKSE

SEQ ID NO: 24800 - protein, 70 aa, Synthetic construct
DNGRVNLRPVVQLIDIMKDLTRLSQDLQHSGVHLDCGGLRLSRPPAPPPGDLQYSFFSSPSLANSHAKSE

SEQ ID NO: 24801 - protein, 70 aa, Synthetic construct
DNGRVNLRPVVQLIDIMKDLTRLSQDLQHSGVHLDCGGLRLSRPPAPPPGDLQYSFFSSPSLANSIRSPE

SEQ ID NO: 24802 - protein, 70 aa, Synthetic construct
AHLRLQPIYWSRDDVAQWLKWAENEFSLRPIDSNTFEMNGKALLLLTKEDFRYRSPHSGDVLYELLQHIL

SEQ ID NO: 24803 - protein, 70 aa, Synthetic construct
RMEEDQPIYWSRDDVAQWLKWAENEFSLRPIDSNTFEMNGKALLLLTKEDFRYRSPHSGDVLYELLQHIL

SEQ ID NO: 24804 - protein, 70 aa, Synthetic construct
RMEEDSIRLPAHLRLQPIYWWAENEFSLRPIDSNTFEMNGKALLLLTKEDFRYRSPHSGDVLYELLQHIL

SEQ ID NO: 24805 - protein, 70 aa, Synthetic construct
GAGRPAAVAAREGSTEFDWGDETSRDSEASSVAARGDSRPRLVAPADLSRFEFDECEAAVMLVSLGSSRS

SEQ ID NO: 24806 - protein, 70 aa, Synthetic construct
MEGLAAAVAAREGSTEFDWGDETSRDSEASSVAARGDSRPRLVAPADLSRFEFDECEAAVMLVSLGSSRS

SEQ ID NO: 24807 - protein, 70 aa, Synthetic construct
MEGLADSGPGREGSTEFDWGDETSRDSEASSVAARGDSRPRLVAPADLSRFEFDECEAAVMLVSLGSSRS

SEQ ID NO: 24808 - protein, 70 aa, Synthetic construct
MEGLADSGPGGAGRPEFDWGDETSRDSEASSVAARGDSRPRLVAPADLSRFEFDECEAAVMLVSLGSSRS

SEQ ID NO: 24809 - protein, 70 aa, Synthetic construct
MEGLADSGPGGAGRPAAVAADETSRDSEASSVAARGDSRPRLVAPADLSRFEFDECEAAVMLVSLGSSRS

SEQ ID NO: 24810 - protein, 70 aa, Synthetic construct
MEGLADSGPGGAGRPAAVAAREGSTDSEASSVAARGDSRPRLVAPADLSRFEFDECEAAVMLVSLGSSRS

SEQ ID NO: 24811 - protein, 70 aa, Synthetic construct
MEGLADSGPGGAGRPAAVAAREGSTEFDWGSVAARGDSRPRLVAPADLSRFEFDECEAAVMLVSLGSSRS

SEQ ID NO: 24812 - protein, 70 aa, Synthetic construct
MEGLADSGPGGAGRPAAVAAREGSTEFDWGDETSRGDSRPRLVAPADLSRFEFDECEAAVMLVSLGSSRS

SEQ ID NO: 24813 - protein, 70 aa, Synthetic construct
MEGLADSGPGGAGRPAAVAAREGSTEFDWGDETSRDSEASRLVAPADLSRFEFDECEAAVMLVSLGSSRS

SEQ ID NO: 24814 - protein, 70 aa, Synthetic construct
MEGLADSGPGGAGRPAAVAAREGSTEFDWGDETSRDSEASSVAARADLSRFEFDECEAAVMLVSLGSSRS

SEQ ID NO: 24815 - protein, 70 aa, Synthetic construct
FEFDECEAAVMLVSLGSSRSGTPSFSPVSTQSPFSPAPSPSPSPLFGFRPANFSPINASPVIQRTAVRSR

SEQ ID NO: 24816 - protein, 70 aa, Synthetic construct
RLVAPADLSRFEFDECEAAVMLVSLGSSRSQSPFSPAPSPSPSPLFGFRPANFSPINASPVIQRTAVRSR

SEQ ID NO: 24817 - protein, 70 aa, Synthetic construct
RLVAPADLSRFEFDECEAAVMLVSLGSSRSGTPSFPAPSPSPSPLFGFRPANFSPINASPVIQRTAVRSR

SEQ ID NO: 24818 - protein, 70 aa, Synthetic construct
RLVAPADLSRFEFDECEAAVMLVSLGSSRSGTPSFSPVSTSPSPLFGFRPANFSPINASPVIQRTAVRSR

SEQ ID NO: 24819 - protein, 70 aa, Synthetic construct
RLVAPADLSRFEFDECEAAVMLVSLGSSRSGTPSFSPVSTQSPFSFGFRPANFSPINASPVIQRTAVRSR

SEQ ID NO: 24820 - protein, 70 aa, Synthetic construct
RLVAPADLSRFEFDECEAAVMLVSLGSSRSGTPSFSPVSTQSPFSPAPSPANFSPINASPVIQRTAVRSR

SEQ ID NO: 24821 - protein, 70 aa, Synthetic construct
RLVAPADLSRFEFDECEAAVMLVSLGSSRSGTPSFSPVSTQSPFSPAPSPSPSPLINASPVIQRTAVRSR

SEQ ID NO: 24822 - protein, 70 aa, Synthetic construct
RLVAPADLSRFEFDECEAAVMLVSLGSSRSGTPSFSPVSTQSPFSPAPSPSPSPLFGFRPVIQRTAVRSR

SEQ ID NO: 24823 - protein, 70 aa, Synthetic construct
RLVAPADLSRFEFDECEAAVMLVSLGSSRSGTPSFSPVSTQSPFSPAPSPSPSPLFGFRPANFSPAVRSR

SEQ ID NO: 24824 - protein, 70 aa, Synthetic construct
RLVAPADLSRFEFDECEAAVMLVSLGSSRSGTPSFSPVSTQSPFSPAPSPSPSPLFGFRPANFSPINASP

SEQ ID NO: 24825 - protein, 70 aa, Synthetic construct
TSDPGPSVRRVPAVQRDSPVIVRNPDVPLPSKFPGEVGTAGEVRAGGPGRGCRETPVPPGVASGKPGLPP

SEQ ID NO: 24826 - protein, 70 aa, Synthetic construct
LLLLPPSVRRVPAVQRDSPVIVRNPDVPLPSKFPGEVGTAGEVRAGGPGRGCRETPVPPGVASGKPGLPP

SEQ ID NO: 24827 - protein, 70 aa, Synthetic construct
LLLLPPPAGLVPAVQRDSPVIVRNPDVPLPSKFPGEVGTAGEVRAGGPGRGCRETPVPPGVASGKPGLPP

SEQ ID NO: 24828 - protein, 70 aa, Synthetic construct
LLLLPPPAGLTSDPGPSVRRVPAVQRDSPVIVRNPDVPLPGEVRAGGPGRGCRETPVPPGVASGKPGLPP

SEQ ID NO: 24829 - protein, 70 aa, Synthetic construct
LLLLPPPAGLTSDPGPSVRRVPAVQRDSPVIVRNPDVPLPSKFPGGGPGRGCRETPVPPGVASGKPGLPP

SEQ ID NO: 24830 - protein, 70 aa, Synthetic construct
LLLLPPPAGLTSDPGPSVRRVPAVQRDSPVIVRNPDVPLPSKFPGEVGTAGCRETPVPPGVASGKPGLPP

SEQ ID NO: 24831 - protein, 70 aa, Synthetic construct
LLLLPPPAGLTSDPGPSVRRVPAVQRDSPVIVRNPDVPLPSKFPGEVGTAGEVRAPVPPGVASGKPGLPP

SEQ ID NO: 24832 - protein, 70 aa, Synthetic construct
LLLLPPPAGLTSDPGPSVRRVPAVQRDSPVIVRNPDVPLPSKFPGEVGTAGEVRAGGPGRVASGKPGLPP

SEQ ID NO: 24833 - protein, 70 aa, Synthetic construct
LLLLPPPAGLTSDPGPSVRRVPAVQRDSPVIVRNPDVPLPSKFPGEVGTAGEVRAGGPGRGCRETPGLPP

SEQ ID NO: 24834 - protein, 70 aa, Synthetic construct
LLLLPPPAGLTSDPGPSVRRVPAVQRDSPVIVRNPDVPLPSKFPGEVGTAGEVRAGGPGRGCRETPVPPG

SEQ ID NO: 24835 - protein, 70 aa, Synthetic construct
NMDESKIKIEPDSEKDEVKGSDAAKGADQNEMDISKITEKKDQDVKELLDSDSDKPCKEEPMEVDDDMKT

SEQ ID NO: 24836 - protein, 70 aa, Synthetic construct
NMDESDKRKCSRSPKDEVKGSDAAKGADQNEMDISKITEKKDQDVKELLDSDSDKPCKEEPMEVDDDMKT

SEQ ID NO: 24837 - protein, 70 aa, Synthetic construct
NMDESDKRKCSRSPKKIKIEPDSEKGADQNEMDISKITEKKDQDVKELLDSDSDKPCKEEPMEVDDDMKT

SEQ ID NO: 24838 - protein, 70 aa, Synthetic construct
NMDESDKRKCSRSPKKIKIEPDSEKDEVKGEMDISKITEKKDQDVKELLDSDSDKPCKEEPMEVDDDMKT

SEQ ID NO: 24839 - protein, 70 aa, Synthetic construct
NMDESDKRKCSRSPKKIKIEPDSEKDEVKGSDAAKKITEKKDQDVKELLDSDSDKPCKEEPMEVDDDMKT

SEQ ID NO: 24840 - protein, 70 aa, Synthetic construct
NMDESDKRKCSRSPKKIKIEPDSEKDEVKGSDAAKGADQNKDQDVKELLDSDSDKPCKEEPMEVDDDMKT

SEQ ID NO: 24841 - protein, 70 aa, Synthetic construct
NMDESDKRKCSRSPKKIKIEPDSEKDEVKGSDAAKGADQNEMDISKELLDSDSDKPCKEEPMEVDDDMKT

SEQ ID NO: 24842 - protein, 70 aa, Synthetic construct
NMDESDKRKCSRSPKKIKIEPDSEKDEVKGSDAAKGADQNEMDISKITEKSDSDKPCKEEPMEVDDDMKT

SEQ ID NO: 24843 - protein, 70 aa, Synthetic construct
NMDESDKRKCSRSPKKIKIEPDSEKDEVKGSDAAKGADQNEMDISKITEKKDQDVPCKEEPMEVDDDMKT

SEQ ID NO: 24844 - protein, 70 aa, Synthetic construct
NMDESDKRKCSRSPKKIKIEPDSEKDEVKGSDAAKGADQNEMDISKITEKKDQDVKELLDPMEVDDDMKT

SEQ ID NO: 24845 - protein, 70 aa, Synthetic construct
NMDESDKRKCSRSPKKIKIEPDSEKDEVKGSDAAKGADQNEMDISKITEKKDQDVKELLDSDSDKPCKEE

SEQ ID NO: 24846 - protein, 70 aa, Synthetic construct
EKEAKKMDVYICNDCKRAQEGSSEELYCICRTPYDESQFYIGCDRCQNWYHGRCVGILQSEAELIDEYVC

SEQ ID NO: 24847 - protein, 70 aa, Synthetic construct
WYHGEKMDVYICNDCKRAQEGSSEELYCICRTPYDESQFYIGCDRCQNWYHGRCVGILQSEAELIDEYVC

SEQ ID NO: 24848 - protein, 70 aa, Synthetic construct
WYHGECVGITICNDCKRAQEGSSEELYCICRTPYDESQFYIGCDRCQNWYHGRCVGILQSEAELIDEYVC

SEQ ID NO: 24849 - protein, 70 aa, Synthetic construct
WYHGECVGITEKEAKKRAQEGSSEELYCICRTPYDESQFYIGCDRCQNWYHGRCVGILQSEAELIDEYVC

SEQ ID NO: 24850 - protein, 70 aa, Synthetic construct
WYHGECVGITEKEAKKMDVYGSSEELYCICRTPYDESQFYIGCDRCQNWYHGRCVGILQSEAELIDEYVC

SEQ ID NO: 24851 - protein, 70 aa, Synthetic construct
WYHGECVGITEKEAKKMDVYICNDCLYCICRTPYDESQFYIGCDRCQNWYHGRCVGILQSEAELIDEYVC

SEQ ID NO: 24852 - protein, 70 aa, Synthetic construct
WYHGECVGITEKEAKKMDVYICNDCKRAQERTPYDESQFYIGCDRCQNWYHGRCVGILQSEAELIDEYVC

SEQ ID NO: 24853 - protein, 70 aa, Synthetic construct
WYHGECVGITEKEAKKMDVYICNDCKRAQEGSSEEESQFYIGCDRCQNWYHGRCVGILQSEAELIDEYVC

SEQ ID NO: 24854 - protein, 70 aa, Synthetic construct
WYHGECVGITEKEAKKMDVYICNDCKRAQEGSSEELYCICIGCDRCQNWYHGRCVGILQSEAELIDEYVC

SEQ ID NO: 24855 - protein, 70 aa, Synthetic construct
WYHGECVGITEKEAKKMDVYICNDCKRAQEGSSEELYCICRTPYDCQNWYHGRCVGILQSEAELIDEYVC

SEQ ID NO: 24856 - protein, 70 aa, Synthetic construct
WYHGECVGITEKEAKKMDVYICNDCKRAQEGSSEELYCICRTPYDESQFYHGRCVGILQSEAELIDEYVC

SEQ ID NO: 24857 - protein, 70 aa, Synthetic construct
WYHGECVGITEKEAKKMDVYICNDCKRAQEGSSEELYCICRTPYDESQFYIGCDRGILQSEAELIDEYVC

SEQ ID NO: 24858 - protein, 70 aa, Synthetic construct
WYHGECVGITEKEAKKMDVYICNDCKRAQEGSSEELYCICRTPYDESQFYIGCDRCQNWYEAELIDEYVC

SEQ ID NO: 24859 - protein, 70 aa, Synthetic construct
WYHGECVGITEKEAKKMDVYICNDCKRAQEGSSEELYCICRTPYDESQFYIGCDRCQNWYHGRCVDEYVC

SEQ ID NO: 24860 - protein, 70 aa, Synthetic construct
WYHGECVGITEKEAKKMDVYICNDCKRAQEGSSEELYCICRTPYDESQFYIGCDRCQNWYHGRCVGILQS

SEQ ID NO: 24861 - protein, 70 aa, Synthetic construct
EAELIDEYVCTVLTPLTEKDYEGLKRVLRSLQAHKMAWPFLEPVDPNDAPDYYGVIKEPMDLATMEERVQ

SEQ ID NO: 24862 - protein, 70 aa, Synthetic construct
EAELIDEYVCPQCQSLTEKDYEGLKRVLRSLQAHKMAWPFLEPVDPNDAPDYYGVIKEPMDLATMEERVQ

SEQ ID NO: 24863 - protein, 70 aa, Synthetic construct
EAELIDEYVCPQCQSTEDAMYEGLKRVLRSLQAHKMAWPFLEPVDPNDAPDYYGVIKEPMDLATMEERVQ

SEQ ID NO: 24864 - protein, 70 aa, Synthetic construct
EAELIDEYVCPQCQSTEDAMTVLTPRVLRSLQAHKMAWPFLEPVDPNDAPDYYGVIKEPMDLATMEERVQ

SEQ ID NO: 24865 - protein, 70 aa, Synthetic construct
EAELIDEYVCPQCQSTEDAMTVLTPLTEKDLQAHKMAWPFLEPVDPNDAPDYYGVIKEPMDLATMEERVQ

SEQ ID NO: 24866 - protein, 70 aa, Synthetic construct
EAELIDEYVCPQCQSTEDAMTVLTPLTEKDYEGLKMAWPFLEPVDPNDAPDYYGVIKEPMDLATMEERVQ

SEQ ID NO: 24867 - protein, 70 aa, Synthetic construct
EAELIDEYVCPQCQSTEDAMTVLTPLTEKDYEGLKRVLRSLEPVDPNDAPDYYGVIKEPMDLATMEERVQ

SEQ ID NO: 24868 - protein, 70 aa, Synthetic construct
EAELIDEYVCPQCQSTEDAMTVLTPLTEKDYEGLKRVLRSLQAHKPNDAPDYYGVIKEPMDLATMEERVQ

SEQ ID NO: 24869 - protein, 70 aa, Synthetic construct
EAELIDEYVCPQCQSTEDAMTVLTPLTEKDYEGLKRVLRSLQAHKMAWPFDYYGVIKEPMDLATMEERVQ

SEQ ID NO: 24870 - protein, 70 aa, Synthetic construct
EAELIDEYVCPQCQSTEDAMTVLTPLTEKDYEGLKRVLRSLQAHKMAWPFLEPVDIKEPMDLATMEERVQ

SEQ ID NO: 24871 - protein, 70 aa, Synthetic construct
EAELIDEYVCPQCQSTEDAMTVLTPLTEKDYEGLKRVLRSLQAHKMAWPFLEPVDPNDAPDLATMEERVQ

SEQ ID NO: 24872 - protein, 70 aa, Synthetic construct
EAELIDEYVCPQCQSTEDAMTVLTPLTEKDYEGLKRVLRSLQAHKMAWPFLEPVDPNDAPDYYGVEERVQ

SEQ ID NO: 24873 - protein, 70 aa, Synthetic construct
EAELIDEYVCPQCQSTEDAMTVLTPLTEKDYEGLKRVLRSLQAHKMAWPFLEPVDPNDAPDYYGVIKEPM

SEQ ID NO: 24874 - protein, 70 aa, Synthetic construct
KAVKEEGQDPDEIGIELEATSKKSAKRCVKGLKMEEEGTEDNGLEDDSRDGQEDMEASLENLQNMGMMDM

SEQ ID NO: 24875 - protein, 70 aa, Synthetic construct
NKSVLMERLKKAVKEELEATSKKSAKRCVKGLKMEEEGTEDNGLEDDSRDGQEDMEASLENLQNMGMMDM

SEQ ID NO: 24876 - protein, 70 aa, Synthetic construct
NKSVLMERLKKAVKEEGQDPDEIGIKRCVKGLKMEEEGTEDNGLEDDSRDGQEDMEASLENLQNMGMMDM

SEQ ID NO: 24877 - protein, 70 aa, Synthetic construct
NKSVLMERLKKAVKEEGQDPDEIGIELEATGLKMEEEGTEDNGLEDDSRDGQEDMEASLENLQNMGMMDM

SEQ ID NO: 24878 - protein, 70 aa, Synthetic construct
NKSVLMERLKKAVKEEGQDPDEIGIELEATSKKSAEEGTEDNGLEDDSRDGQEDMEASLENLQNMGMMDM

SEQ ID NO: 24879 - protein, 70 aa, Synthetic construct
NKSVLMERLKKAVKEEGQDPDEIGIELEATSKKSAKRCVKDNGLEDDSRDGQEDMEASLENLQNMGMMDM

SEQ ID NO: 24880 - protein, 70 aa, Synthetic construct
NKSVLMERLKKAVKEEGQDPDEIGIELEATSKKSAKRCVKGLKMEDDSRDGQEDMEASLENLQNMGMMDM

SEQ ID NO: 24881 - protein, 70 aa, Synthetic construct
NKSVLMERLKKAVKEEGQDPDEIGIELEATSKKSAKRCVKGLKMEEEGTEGQEDMEASLENLQNMGMMDM

SEQ ID NO: 24882 - protein, 70 aa, Synthetic construct
NKSVLMERLKKAVKEEGQDPDEIGIELEATSKKSAKRCVKGLKMEEEGTEDNGLEEASLENLQNMGMMDM

SEQ ID NO: 24883 - protein, 70 aa, Synthetic construct
NKSVLMERLKKAVKEEGQDPDEIGIELEATSKKSAKRCVKGLKMEEEGTEDNGLEDDSRDNLQNMGMMDM

SEQ ID NO: 24884 - protein, 70 aa, Synthetic construct
NKSVLMERLKKAVKEEGQDPDEIGIELEATSKKSAKRCVKGLKMEEEGTEDNGLEDDSRDGQEDMGMMDM

SEQ ID NO: 24885 - protein, 70 aa, Synthetic construct
KAKNEPAGKKLSDRKECEVKKEKLSSVDRHHSVEIKIEKTVIKKEEKIEKKEEKKPEDIKKEEKDQDELK

SEQ ID NO: 24886 - protein, 70 aa, Synthetic construct
ELHGRMISVELSDRKECEVKKEKLSSVDRHHSVEIKIEKTVIKKEEKIEKKEEKKPEDIKKEEKDQDELK

SEQ ID NO: 24887 - protein, 70 aa, Synthetic construct
ELHGRMISVEKAKNEPAGKKLSDRKECEVKKEKLSSVDRHHSVEIKIEKTVIKKEEKIEKKEEKKQDELK

SEQ ID NO: 24888 - protein, 70 aa, Synthetic construct
ELHGRMISVEKAKNEPAGKKLSDRKECEVKKEKLSSVDRHHSVEIKIEKTVIKKEEKIEKKEEKKPEDIK

SEQ ID NO: 24889 - protein, 70 aa, Synthetic construct
QTKLKQRRSRTNFTLEQLNELERLFDETHYPDAFMREELSQRLGLSEARVQVWFQNRRAKCRKQENQMHK

SEQ ID NO: 24890 - protein, 20 aa, Synthetic construct
TVSGSCMSTGFSRAVQTHSS

SEQ ID NO: 24891 - protein, 5 aa, Synthetic construct
LKSIC

SEQ ID NO: 24892 - protein, 15 aa, Synthetic construct
DVNRLKREIEKRRGA

SEQ ID NO: 24893 - protein, 15 aa, Synthetic construct
KHVKSEPNLHPVLMS

SEQ ID NO: 24894 - protein, 65 aa, Synthetic construct
VSSSKKRRHRTTFTSLQLEELEKVFQKTHYPDVYVREQLALRTELTEARVQVWFQNRRAKWRKRE

SEQ ID NO: 24895 - protein, 60 aa, Synthetic construct
KKRRNRTTFSTFQLEELEKVFQKTHYPDVYAREQLALRTDLTEARVQVWFQNRRAKWRKR

SEQ ID NO: 24896 - protein, 10 aa, Synthetic construct
DTQWERLVAS

SEQ ID NO: 24897 - protein, 10 aa, Synthetic construct
VPALYSDAYD

SEQ ID NO: 24898 - protein, 5 aa, Synthetic construct
PDENE

SEQ ID NO: 24899 - protein, 10 aa, Synthetic construct
GEEWKEKTDR

SEQ ID NO: 24900 - protein, 5 aa, Synthetic construct
WKDIV

SEQ ID NO: 24901 - protein, 5 aa, Synthetic construct
GEWIW

SEQ ID NO: 24902 - protein, 5 aa, Synthetic construct
IKKEE

SEQ ID NO: 24903 - protein, 15 aa, Synthetic construct
SVEINGIMYTGVLFA

SEQ ID NO: 24904 - protein, 15 aa, Synthetic construct
SVDIDGTTYAGVLFA

SEQ ID NO: 24905 - protein, 10 aa, Synthetic construct
QEMPLTEVKS

SEQ ID NO: 24906 - protein, 5 aa, Synthetic construct
VVCPD

SEQ ID NO: 24907 - protein, 10 aa, Synthetic construct
SRPSVIQHVQ

SEQ ID NO: 24908 - protein, 15 aa, Synthetic construct
KTVKKIKISVRQYAD

SEQ ID NO: 24909 - protein, 70 aa, Synthetic construct; identical to SEQ ID NO: 24299

SEQ ID NO: 24910 - protein, 45 aa, Synthetic construct
KLVNLGFATLREHVPNGAANKKMSKVETLRSAVEYIRALQQLLDE

SEQ ID NO: 24911 - protein, 45 aa, Synthetic construct
RVKLVNLGFQALRQHVPHGGASKKLSKVETLRSAVEYIRALQRLL

SEQ ID NO: 24912 - protein, 10 aa, Synthetic construct
GYAQLRHHLP

SEQ ID NO: 24913 - protein, 15 aa, Synthetic construct
AAIKYINYLQSLLYP

SEQ ID NO: 24914 - protein, 10 aa, Synthetic construct
RDHLPRELAD

SEQ ID NO: 24915 - protein, 10 aa, Synthetic construct
VETLRAAIDY

SEQ ID NO: 24916 - protein, 5 aa, Synthetic construct
ELLER

SEQ ID NO: 24917 - protein, 20 aa, Synthetic construct
GVFPYVPFPGAFGVYEYPFE

SEQ ID NO: 24918 - protein, 45 aa, Synthetic construct
GYARLRGHLPGALAEKRLSKVETLRAAIRYIKYLQELLSSAPDGS

SEQ ID NO: 24919 - protein, 10 aa, Synthetic construct
GFYPSYGMPY

SEQ ID NO: 24920 - protein, 5 aa, Synthetic construct
GLGYY

SEQ ID NO: 24921 - protein, 5 aa, Synthetic construct
PPPSY

SEQ ID NO: 24922 - protein, 35 aa, Synthetic construct
DDDVIRCICGLYKDEGLMIQCDKCMVWQHCDCMGV

SEQ ID NO: 24923 - protein, 45 aa, Synthetic construct
TPEERRHNQRERLNQILLNLLEKIPGKNAIDVTYLLEEGSGRKLR

SEQ ID NO: 24924 - protein, 25 aa, Synthetic construct
NRSIPCKVIVDHSTTLTSSLSLTVS

SEQ ID NO: 24925 - protein, 15 aa, Synthetic construct
CPQVSVISRPEPVAN

SEQ ID NO: 24926 - protein, 10 aa, Synthetic construct
RDIDLICSNA

SEQ ID NO: 24927 - protein, 10 aa, Synthetic construct
LEYNPDRDPG

SEQ ID NO: 24928 - protein, 10 aa, Synthetic construct
NLHRPTCIVR

SEQ ID NO: 24929 - protein, 5 aa, Synthetic construct
MHGLN

SEQ ID NO: 24930 - protein, 30 aa, Synthetic construct
PSFNNDKKLSKYETLQMAQIYINALSELLQ

SEQ ID NO: 24931 - protein, 50 aa, Synthetic construct
RMQGLNTAFDRLRRVVPQWGQDKKLSKYETLQMALSYIMALTRILAEAER

SEQ ID NO: 24932 - protein, 15 aa, Synthetic construct
SEYKVKEEGDREISS

SEQ ID NO: 24933 - protein, 10 aa, Synthetic construct
RTAFTDHQLA

SEQ ID NO: 24934 - protein, 10 aa, Synthetic construct
QLERSFERQK

SEQ ID NO: 24935 - protein, 10 aa, Synthetic construct
YLSVQDRMEL

SEQ ID NO: 24936 - protein, 5 aa, Synthetic construct
LTDTQ

SEQ ID NO: 24937 - protein, 15 aa, Synthetic construct
TSTSSFLIKDILGDS

SEQ ID NO: 24938 - protein, 20 aa, Synthetic construct
RPHRYRSFMIEEILTEPPGP

SEQ ID NO: 24939 - protein, 15 aa, Synthetic construct
KLKTVPEGDWFCPEC

SEQ ID NO: 24940 - protein, 15 aa, Synthetic construct
LCDECNKAFHLFCLR

SEQ ID NO: 24941 - protein, 15 aa, Synthetic construct
HDLSQSAFLSWLSQT

SEQ ID NO: 24942 - protein, 10 aa, Synthetic construct
GISDSPNGFL

SEQ ID NO: 24943 - protein, 20 aa, Synthetic construct
ENSEKPSGKRKCKTKHMATV

SEQ ID NO: 24944 - protein, 10 aa, Synthetic construct
DVVLYCLQKD

SEQ ID NO: 24945 - protein, 10 aa, Synthetic construct
HRDNAGYTAL

SEQ ID NO: 24946 - protein, 10 aa, Synthetic construct
LKSPPQLERE

SEQ ID NO: 24947 - protein, 10 aa, Synthetic construct
PLDLSSKSNR

SEQ ID NO: 24948 - protein, 10 aa, Synthetic construct
TPPMPVLTPV

SEQ ID NO: 24949 - protein, 10 aa, Synthetic construct
VLSRSQRTTQ

SEQ ID NO: 24950 - protein, 50 aa, Synthetic construct
VRERKRILDYNEAFNALRRALRHDLGGKRLSKIATLRRAIHRIAALSLVL

SEQ ID NO: 24951 - protein, 20 aa, Synthetic construct
EPLAYCVPVIQRTQPSAELA

SEQ ID NO: 24952 - protein, 10 aa, Synthetic construct
EAELIDEYVC

SEQ ID NO: 24953 - protein, 10 aa, Synthetic construct
LTNVKTEASP

SEQ ID NO: 24954 - protein, 15 aa, Synthetic construct
MATLGPHRVKTEPPV

SEQ ID NO: 24955 - protein, 10 aa, Synthetic construct
IDKKDECPTS

SEQ ID NO: 24956 - protein, 20 aa, Synthetic construct
TPAHEVGRRTSVLFSKKNPK

SEQ ID NO: 24957 - protein, 10 aa, Synthetic construct
KRPGRPPKNR

SEQ ID NO: 24958 - protein, 10 aa, Synthetic construct
NLAVHQECYG

SEQ ID NO: 24959 - protein, 10 aa, Synthetic construct
AGTPLSGVGR

SEQ ID NO: 24960 - protein, 10 aa, Synthetic construct
FKKAKNGVKL

SEQ ID NO: 24961 - protein, 10 aa, Synthetic construct
PTSFFIEDIL

SEQ ID NO: 24962 - protein, 10 aa, Synthetic construct
EIEMLRAAVK

SEQ ID NO: 24963 - protein, 10 aa, Synthetic construct
LNHISCVIKE

SEQ ID NO: 24964 - protein, 10 aa, Synthetic construct
IKATVKRKVY

SEQ ID NO: 24965 - protein, 10 aa, Synthetic construct
PKKVASGVLS

SEQ ID NO: 24966 - protein, 20 aa, Synthetic construct
DNQFRMSILERLEQMERRMA

SEQ ID NO: 24967 - protein, 15 aa, Synthetic construct
VFVTDVTANLITVTV

SEQ ID NO: 24968 - protein, 10 aa, Synthetic construct
SVGFFNLRHY

SEQ ID NO: 24969 - protein, 55 aa, Synthetic construct
MASQEFEVEAIVDKRQDKNGNTQYLVRWKGYDKQDDTWEPEQHLMNCEKCVHDFN

SEQ ID NO: 24970 - protein, 10 aa, Synthetic construct
HFTIRLTESA

SEQ ID NO: 24971 - protein, 5 aa, Synthetic construct
IVVKK

SEQ ID NO: 24972 - protein, 10 aa, Synthetic construct
MHFTIRLTES

SEQ ID NO: 24973 - protein, 10 aa, Synthetic construct
DIVVKKEDGF

SEQ ID NO: 24974 - protein, 45 aa, Synthetic construct
MASEELYEVERIVDKRKNKKGKTEYLVRWKGYDSEDDTWEPEQHL

SEQ ID NO: 24975 - protein, 45 aa, Synthetic construct
MASGDLYEVERIVDKRKNKKGKWEYLIRWKGYGSTEDTWEPEHHL

SEQ ID NO: 24976 - protein, 10 aa, Synthetic construct
PLVIKQEPRE

SEQ ID NO: 24977 - protein, 10 aa, Synthetic construct
ELKAEPGFEP

SEQ ID NO: 24978 - protein, 10 aa, Synthetic construct
GFPYALRAYL

SEQ ID NO: 24979 - protein, 45 aa, Synthetic construct
KAKKTVDKHSDEYKIRRERNNIAVRKSRDKAKMRNLETQHKVLEL

SEQ ID NO: 24980 - protein, 10 aa, Synthetic construct
RLQKKVEQLS

SEQ ID NO: 24981 - protein, 45 aa, Synthetic construct
AGKRGPDRGSPEYRQRRERNNIAVRKSRDKAKRRNQEMQQKLVEL

SEQ ID NO: 24982 - protein, 15 aa, Synthetic construct
VEQLTRDLAGLRQFF

SEQ ID NO: 24983 - protein, 15 aa, Synthetic construct
RWMSDHLSIKPVKQE

SEQ ID NO: 24984 - protein, 10 aa, Synthetic construct
RRKLREERAW

SEQ ID NO: 24985 - protein, 10 aa, Synthetic construct
EEEDDEDEDD

SEQ ID NO: 24986 - protein, 45 aa, Synthetic construct
PVPSFGEAMAYFAMVKRYLTSFPIDDRVQSHILHLEHDLVHVTRK

SEQ ID NO: 24987 - protein, 30 aa, Synthetic construct
MIFYQKSAKLFHCHKCFFTSKMYSNVYYHI

SEQ ID NO: 24988 - protein, 20 aa, Synthetic construct
QGGEIILCDTCPRAYHLVCL

SEQ ID NO: 24989 - protein, 10 aa, Synthetic construct
KWSCPHCEKE

SEQ ID NO: 24990 - protein, 15 aa, Synthetic construct
LKSTTKMSLNERFTN

SEQ ID NO: 24991 - protein, 30 aa, Synthetic construct
RLVAPADLSRFEFDECEAAVMLVSLGSSRS

SEQ ID NO: 24992 - protein, 20 aa, Synthetic construct
VPAVQRDSPVIVRNPDVPLP

SEQ ID NO: 24993 - protein, 15 aa, Synthetic construct
DRKYIVLEGSKVLIY

SEQ ID NO: 24994 - protein, 10 aa, Synthetic construct
PVEEFELCLP

SEQ ID NO: 24995 - protein, 5 aa, Synthetic construct
KVEVK

SEQ ID NO: 24996 - protein, 15 aa, Synthetic construct
IWPSGFVCDNCLKKT

SEQ ID NO: 24997 - protein, 35 aa, Synthetic construct
KHHVETRWHCTVCEDYDLCINCYNTKSHAHKMVKW

SEQ ID NO: 24998 - protein, 5 aa, Synthetic construct
EMKTE

SEQ ID NO: 24999 - protein, 5 aa, Synthetic construct
QVKEE

SEQ ID NO: 25000 - protein, 10 aa, Synthetic construct
AKIDLKAKLE

SEQ ID NO: 25001 - protein, 35 aa, Synthetic construct
RYQYLEELVSSRERAICALREELEMYKQWCMAMDQ

SEQ ID NO: 25002 - protein, 20 aa, Synthetic construct
PMICHTLPLPEGFQVVKVGA

SEQ ID NO: 25003 - protein, 15 aa, Synthetic construct
TLPLPEGFQVVKVGA

SEQ ID NO: 25004 - protein, 20 aa, Synthetic construct
YQDSFEQRFLEETNRLYAAE

SEQ ID NO: 25005 - protein, 20 aa, Synthetic construct
VQITLAARLGEAEEKIKVLH

SEQ ID NO: 25006 - protein, 10 aa, Synthetic construct
LELRRKYDEE

SEQ ID NO: 25007 - protein, 25 aa, Synthetic construct
RKPDINCFMIGCDNCNEWFHGDCIR

SEQ ID NO: 25008 - protein, 15 aa, Synthetic construct
EWYCRECREKDPKLE

SEQ ID NO: 25009 - protein, 45 aa, Synthetic construct
KKRKRCGMCAPCRRRINCEQCSSCRNRKTGHQICKFRKCEELKKK

SEQ ID NO: 25010 - protein, 15 aa, Synthetic construct
FLKFGVNAILSSGPR

SEQ ID NO: 25011 - protein, 10 aa, Synthetic construct
FAFPYFEGSF

SEQ ID NO: 25012 - protein, 15 aa, Synthetic construct
GNLGKSFLIENLLRV

SEQ ID NO: 25013 - protein, 10 aa, Synthetic construct
KEEPEAEVRM

SEQ ID NO: 25014 - protein, 35 aa, Synthetic construct
TPKCARCRNHGVVSALKGHKRYCRWKDCLCAKCTL

SEQ ID NO: 25015 - protein, 45 aa, Synthetic construct
EASPLSWTPVPPGPWVPGHWLPPGFSMPPPVVCRLLYQEPAVSLP

SEQ ID NO: 25016 - protein, 60 aa, Synthetic construct
KQRRNRTTFTLQQLEALEAVFAQTHYPDVFTREELAMKINLTEARVQVWFQNRRAKWRKT

SEQ ID NO: 25017 - protein, 5 aa, Synthetic construct
LWGLE

SEQ ID NO: 25018 - protein, 10 aa, Synthetic construct
SYDLGDLLIN

SEQ ID NO: 25019 - protein, 10 aa, Synthetic construct
YVTYQDIHSI

SEQ ID NO: 25020 - protein, 5 aa, Synthetic construct
QIVIA

SEQ ID NO: 25021 - protein, 15 aa, Synthetic construct
VHIRSTNGPIDVYLC

SEQ ID NO: 25022 - protein, 30 aa, Synthetic construct
DMRRFQVVVSTTVNVDGHVLAVSDNMFVHN

SEQ ID NO: 25023 - protein, 15 aa, Synthetic construct
TTNFFIDNILRPDFG

SEQ ID NO: 25024 - protein, 10 aa, Synthetic construct
TNFFIDNILR

SEQ ID NO: 25025 - protein, 10 aa, Synthetic construct
SIKCEDINAE

SEQ ID NO: 25026 - protein, 10 aa, Synthetic construct
VCDGCLKKSA

SEQ ID NO: 25027 - protein, 10 aa, Synthetic construct
SVCSENESEA

SEQ ID NO: 25028 - protein, 10 aa, Synthetic construct
VTQDGDMIFL

SEQ ID NO: 25029 - protein, 10 aa, Synthetic construct
CMPLKLRFKR

SEQ ID NO: 25030 - protein, 10 aa, Synthetic construct
GGPLTPRRVS

SEQ ID NO: 25031 - protein, 80 aa, Synthetic construct; identical to SEQ ID NO: 1831

SEQ ID NO: 25032 - protein, 10 aa, Synthetic construct
YIKAEPASPD

SEQ ID NO: 25033 - protein, 35 aa, Synthetic construct
RLCLVCGDVASGYHYGVASCEACKAFFKRTIQGSI

SEQ ID NO: 25034 - protein, 10 aa, Synthetic construct
NAIPKRLCLV

SEQ ID NO: 25035 - protein, 10 aa, Synthetic construct
SGYHYGVASC

SEQ ID NO: 25036 - protein, 30 aa, Synthetic construct
KRLCLVCGDIASGYHYGVASCEACKAFFKR

SEQ ID NO: 25037 - protein, 70 aa, Synthetic construct; identical to SEQ ID NO: 21277

SEQ ID NO: 25038 - protein, 10 aa, Synthetic construct
HGLPLKIKKE

SEQ ID NO: 25039 - protein, 15 aa, Synthetic construct
YPGAGVVIKQEQTDF

SEQ ID NO: 25040 - protein, 65 aa, Synthetic construct
QPIYWSRDDVAQWLKWAENEFSLRPIDSNTFEMNGKALLLLTKEDFRYRSPHSGDVLYELLQHIL

SEQ ID NO: 25041 - protein, 70 aa, Synthetic construct; identical to SEQ ID NO: 19386

SEQ ID NO: 25042 - protein, 20 aa, Synthetic construct
RLAMTWPHPADPAFYTYMMS

SEQ ID NO: 25043 - protein, 15 aa, Synthetic construct
PFPSHLPLPYYSPVG

SEQ ID NO: 25044 - protein, 15 aa, Synthetic construct
WPHPADPSFYTYMMT

SEQ ID NO: 25045 - protein, 10 aa, Synthetic construct
PFHSHVPLHY

SEQ ID NO: 25046 - protein, 10 aa, Synthetic construct
SGAAAAASSP

SEQ ID NO: 25047 - protein, 10 aa, Synthetic construct
FRALSHPYSR

SEQ ID NO: 25048 - protein, 10 aa, Synthetic construct
IKTEDSLNHS

SEQ ID NO: 25049 - protein, 25 aa, Synthetic construct
QKPGRWCAVHVQIAWQIYRHQQKIK

SEQ ID NO: 25050 - protein, 40 aa, Synthetic construct
LERFKRMCQLLERVPDTSSSSSDSDSDSDSSGTSLSEDEA

SEQ ID NO: 25051 - protein, 15 aa, Synthetic construct
KPLAFSIERIMARTP

SEQ ID NO: 25052 - protein, 15 aa, Synthetic construct
PATSKTLAFSIERIM

SEQ ID NO: 25053 - protein, 45 aa, Synthetic construct
NRGFARLKALVPFLPQSRKPSKVDILKGATEYIQVLSDLLEGAKD

SEQ ID NO: 25054 - protein, 80 aa, Synthetic construct; identical to SEQ ID NO: 2057

SEQ ID NO: 25055 - protein, 10 aa, Synthetic construct
VRVNVKREYD

SEQ ID NO: 25056 - protein, 10 aa, Synthetic construct
KPALEEEEAP

SEQ ID NO: 25057 - protein, 10 aa, Synthetic construct
LSLPPKKRSI

SEQ ID NO: 25058 - protein, 10 aa, Synthetic construct
QQKFHLVPSI

SEQ ID NO: 25059 - protein, 15 aa, Synthetic construct
SQELQWMVQPHFLGP

SEQ ID NO: 25060 - protein, 10 aa, Synthetic construct
QPRPGVIRAL

SEQ ID NO: 25061 - protein, 10 aa, Synthetic construct
CEQISPEEEE

SEQ ID NO: 25062 - protein, 10 aa, Synthetic construct
GAVVVKQEPL

SEQ ID NO: 25063 - protein, 10 aa, Synthetic construct
LPRPGVIKTI

SEQ ID NO: 25064 - protein, 15 aa, Synthetic construct
PHYSFNHPFSINNLM

SEQ ID NO: 25065 - protein, 10 aa, Synthetic construct
FKAYEQALQY

SEQ ID NO: 25066 - protein, 10 aa, Synthetic construct
LPLGSASVTT

SEQ ID NO: 25067 - protein, 15 aa, Synthetic construct
PAYYQGVYSRPVLNT

SEQ ID NO: 25068 - protein, 20 aa, Synthetic construct
QPSGFKHPFAIENIIAREYK

SEQ ID NO: 25069 - protein, 10 aa, Synthetic construct
GTGWPHVYGS

SEQ ID NO: 25070 - protein, 10 aa, Synthetic construct
VIKSEAASPA

SEQ ID NO: 25071 - protein, 10 aa, Synthetic construct
KVETLSPESA

SEQ ID NO: 25072 - protein, 10 aa, Synthetic construct
IKTEDGEGIV

SEQ ID NO: 25073 - protein, 10 aa, Synthetic construct
LGDSGYASQP

SEQ ID NO: 25074 - protein, 10 aa, Synthetic construct
KQTCQEIDEE

SEQ ID NO: 25075 - protein, 15 aa, Synthetic construct
GSLLHLAGIRTCLGS

SEQ ID NO: 25076 - protein, 10 aa, Synthetic construct
KTQNQKQRKK

SEQ ID NO: 25077 - protein, 10 aa, Synthetic construct
KPPESDDEEM

SEQ ID NO: 25078 - protein, 15 aa, Synthetic construct
SLLHLAGIRSCLNNI

SEQ ID NO: 25079 - protein, 10 aa, Synthetic construct
VHVKEEPLDP

SEQ ID NO: 25080 - protein, 15 aa, Synthetic construct
FSSSFAIDSILRKPF

SEQ ID NO: 25081 - protein, 65 aa, Synthetic construct
TCCANCQTTTTTLWRRNANGDPVCNACGLYYKLHNVNRPLTMKKEGIQTRNRKMSNKSKKSKKGA

SEQ ID NO: 25082 - protein, 10 aa, Synthetic construct
KPKRRLSAAR

SEQ ID NO: 25083 - protein, 50 aa, Synthetic construct
CANCQTTTTTLWRRNANGDPVCNACGLYYKLHNINRPLTMKKEGIQTRNR

SEQ ID NO: 25084 - protein, 70 aa, Synthetic construct; identical to SEQ ID NO: 19544

SEQ ID NO: 25085 - protein, 40 aa, Synthetic construct
GTAFSIDSLIGPPPPRSGHLLYTGYPMFMPYRPLVLPQAL

SEQ ID NO: 25086 - protein, 10 aa, Synthetic construct
PLAPLASFAG

SEQ ID NO: 25087 - protein, 10 aa, Synthetic construct
RCPNCDGPLK

SEQ ID NO: 25088 - protein, 15 aa, Synthetic construct
QLFELLQDLVDHVND

SEQ ID NO: 25089 - protein, 10 aa, Synthetic construct
EDYLRSFRPY

SEQ ID NO: 25090 - protein, 15 aa, Synthetic construct
AAAYYHPSYLAPHPF

SEQ ID NO: 25091 - protein, 5 aa, Synthetic construct
LRSPF

SEQ ID NO: 25092 - protein, 55 aa, Synthetic construct
PRLALSTRYSPDEMNNSPNFEEKKKFLTIFNLTHISAEKRKDKERLVEMLRAMKQ

SEQ ID NO: 25093 - protein, 10 aa, Synthetic construct
RDSPAVSLSE

SEQ ID NO: 25094 - protein, 65 aa, Synthetic construct
NQLPSSKRMRTAFTSTQLLELEREFASNMYLSRLRRIEIATYLNLSEKQVKIWFQNRRVKHKKEG

SEQ ID NO: 25095 - protein, 55 aa, Synthetic construct
SAFTRKDEIITSLVSALDSMCSALSKLNAEVACVAVHDESAFVVGTEKGRMFLNA

SEQ ID NO: 25096 - protein, 10 aa, Synthetic construct
FCRGPPWKDP

SEQ ID NO: 25097 - protein, 10 aa, Synthetic construct
KERRRTQSIN

SEQ ID NO: 25098 - protein, 35 aa, Synthetic construct
LRECIPNVPADTKLSKIKTLRLATSYIAYLMDLLA

SEQ ID NO: 25099 - protein, 10 aa, Synthetic construct
ADSMWRPWRN

SEQ ID NO: 25100 - protein, 10 aa, Synthetic construct
LRVWRPWGSP

SEQ ID NO: 25101 - protein, 10 aa, Synthetic construct
PGGPWRPWLR

SEQ ID NO: 25102 - protein, 10 aa, Synthetic construct
QPACGLWRPW

SEQ ID NO: 25103 - protein, 10 aa, Synthetic construct
QIARSVWRPW

SEQ ID NO: 25104 - protein, 15 aa, Synthetic construct
STCSFSIERILGLDQ

SEQ ID NO: 25105 - protein, 65 aa, Synthetic construct
ILARKRRRGIIEKRRRDRINNSLSELRRLVPSAFEKQGSAKLEKAEILQMTVDHLKMLHTAGGKG

SEQ ID NO: 25106 - protein, 55 aa, Synthetic construct
TTSQIMARKKRRGIIEKRRRDRINNSLSELRRLVPTAFEKQGSAKLEKAEILQMT

SEQ ID NO: 25107 - protein, 10 aa, Synthetic construct
MLQATGGKGY

SEQ ID NO: 25108 - protein, 65 aa, Synthetic construct
RPLHKRKGGQVRFSNDQTIELEKKFETQKYLSPPERKRLAKMLQLSERQVKTWFQNRRAKWRRLK

SEQ ID NO: 25109 - protein, 10 aa, Synthetic construct
GISVIQHTNS

SEQ ID NO: 25110 - protein, 10 aa, Synthetic construct
NVISVIQHTN

SEQ ID NO: 25111 - protein, 20 aa, Synthetic construct
FFSTQAMSSLLSSPYSMPPL

SEQ ID NO: 25112 - protein, 5 aa, Synthetic construct
SFLPM

SEQ ID NO: 25113 - protein, 10 aa, Synthetic construct
SALSSGFFLP

SEQ ID NO: 25114 - protein, 80 aa, Synthetic construct; identical to SEQ ID NO: 2109

SEQ ID NO: 25115 - protein, 10 aa, Synthetic construct
ISVIQHTSSF

SEQ ID NO: 25116 - protein, 15 aa, Synthetic construct
KDLKFGIDRILSAEF

SEQ ID NO: 25117 - protein, 45 aa, Synthetic construct
TMSHYTDEPRFTIEQIDLLQRLRRTGMTKHEILHALETLDRLDQE

SEQ ID NO: 25118 - protein, 65 aa, Synthetic construct
KPACRKKKTRTVFSRSQVFQLESTFDMKRYLSSSERAGLAASLHLTETQVKIWFQNRRNKWKRQL

SEQ ID NO: 25119 - protein, 35 aa, Synthetic construct
PAEVVVCLDEEEEEEEEELPEDDEEEEEEEEEDDD

SEQ ID NO: 25120 - protein, 70 aa, Synthetic construct; identical to SEQ ID NO: 23643

SEQ ID NO: 25121 - protein, 15 aa, Synthetic construct
HTKLKKTWLTRHSEQ

SEQ ID NO: 25122 - protein, 10 aa, Synthetic construct
ALWREVASLR

SEQ ID NO: 25123 - protein, 60 aa, Synthetic construct
KVYKCEHCRVLFLDHVMYTIHMGCHGFRDPFECNMCGYHSQDRYEFSSHITRGEHRFHMS

SEQ ID NO: 25124 - protein, 15 aa, Synthetic construct
TNSVKLEMQSDEECD

SEQ ID NO: 25125 - protein, 55 aa, Synthetic construct
KCEHCRVLFLDHVMYTIHMGCHGYRDPLECNICGYRSQDRYEFSSHIVRGEHTFH

SEQ ID NO: 25126 - protein, 55 aa, Synthetic construct
KCEHCRILFLDHVMFTIHMGCHGFRDPFECNICGYHSQDRYEFSSHIVRGEHKVG

SEQ ID NO: 25127 - protein, 55 aa, Synthetic construct
HCQHCDMYFADNILYTIHMGCHGYENPFQCNICGCKCKNKYDFACHFARGQHNQH

SEQ ID NO: 25128 - protein, 10 aa, Synthetic construct
HKKFRRQAYL

SEQ ID NO: 25129 - protein, 15 aa, Synthetic construct
GKPKIWSLAETATSP

SEQ ID NO: 25130 - protein, 35 aa, Synthetic construct
FLPSHGLYTCHIGKFSNWTNSAFLAQGSLLNMRSF

SEQ ID NO: 25131 - protein, 10 aa, Synthetic construct
PELGAALGIY

SEQ ID NO: 25132 - protein, 15 aa, Synthetic construct
YLPYSPEPPSLYGAL

SEQ ID NO: 25133 - protein, 20 aa, Synthetic construct
GAYYPYERTLGQYQYERYGA

SEQ ID NO: 25134 - protein, 15 aa, Synthetic construct
LSLSFSIEAILKRPA

SEQ ID NO: 25135 - protein, 10 aa, Synthetic construct
LNRHRPTCIV

SEQ ID NO: 25136 - protein, 15 aa, Synthetic construct
YHTKLKKAWLTRHSE

SEQ ID NO: 25137 - protein, 40 aa, Synthetic construct
PYSLNGYRVRVYRQDSATQWFTGIITHHDLFTRTMIVMND

SEQ ID NO: 25138 - protein, 60 aa, Synthetic construct
IMRSCSGINFEEFYHFLKVIAEKRLLVLREAAAEDGAGLGFEQAAFDVGRITEVLASLVA

SEQ ID NO: 25139 - protein, 5 aa, Synthetic construct
KWYRI

SEQ ID NO: 25140 - protein, 15 aa, Synthetic construct
SSSSSSSSSSDSDSE

SEQ ID NO: 25141 - protein, 50 aa, Synthetic construct
WEQAAVAFDAVLRFAERQPCFSAQEVGQLRALRAVFRSQQQVRRRRGALG

SEQ ID NO: 25142 - protein, 10 aa, Synthetic construct
ASPELERLII

SEQ ID NO: 25143 - protein, 25 aa, Synthetic construct
QEGFAEGFVRALAELHSQNTLPSVT

SEQ ID NO: 25144 - protein, 10 aa, Synthetic construct
QTSARRMGTS

SEQ ID NO: 25145 - protein, 15 aa, Synthetic construct
ELDLVFLDHSYAKPW

SEQ ID NO: 25146 - protein, 5 aa, Synthetic construct
PTRML

SEQ ID NO: 25147 - protein, 15 aa, Synthetic construct
EQLSYFCDKCQKWIP

SEQ ID NO: 25148 - protein, 55 aa, Synthetic construct
RRVRCRKCKACVQGECGVCHYCRDMKKFGGPGRMKQSCVLRQCLAPRLPHSVTCS

SEQ ID NO: 25149 - protein, 60 aa, Synthetic construct
TTAGARRRRTRCRKCEACLRTECGECHFCKDMKKFGGPGRMKQSCIMRQCIAPVLPHTAV

SEQ ID NO: 25150 - protein, 10 aa, Synthetic construct
EAGKEDTVEE

SEQ ID NO: 25151 - protein, 25 aa, Synthetic construct
MKQSCIMRQCIAPVLPHTAVCLVCG

SEQ ID NO: 25152 - protein, 15 aa, Synthetic construct
EEGKFNLMLMECSIC

SEQ ID NO: 25153 - protein, 20 aa, Synthetic construct
IHWVCRKCGFGVCLDCYRLR

SEQ ID NO: 25154 - protein, 10 aa, Synthetic construct
ELKNVKLEEE

SEQ ID NO: 25155 - protein, 35 aa, Synthetic construct
AGQKVISKHKNGRFYQCEVVRLTTETFYEVNFDDG

SEQ ID NO: 25156 - protein, 10 aa, Synthetic construct
LYPEDIVSQD

SEQ ID NO: 25157 - protein, 10 aa, Synthetic construct
EVVQVRWTDG

SEQ ID NO: 25158 - protein, 30 aa, Synthetic construct
EPRVAESQELSNWRDDIVLRRAALGLRLLP

SEQ ID NO: 25159 - protein, 45 aa, Synthetic construct
FMIECDICKDWFHGSCVGVEEHHAVDIDLYHCPNCAVLHGSSLMK

SEQ ID NO: 25160 - protein, 10 aa, Synthetic construct
ATSVIRHTAD

SEQ ID NO: 25161 - protein, 10 aa, Synthetic construct
GTSVIRHTGE

SEQ ID NO: 25162 - protein, 30 aa, Synthetic construct
SERSTCSILEQTDMEAVEALVCMSSWGQRS

SEQ ID NO: 25163 - protein, 10 aa, Synthetic construct
DFHSLSTLCI

SEQ ID NO: 25164 - protein, 10 aa, Synthetic construct
QIQPVPVKQE

SEQ ID NO: 25165 - protein, 10 aa, Synthetic construct
LVNIQGQTFA

SEQ ID NO: 25166 - protein, 15 aa, Synthetic construct
LMFDPVPVKQEAMDP

SEQ ID NO: 25167 - protein, 5 aa, Synthetic construct
IKIEP

SEQ ID NO: 25168 - protein, 10 aa, Synthetic construct
LFNDIKIEPP

SEQ ID NO: 25169 - protein, 10 aa, Synthetic construct
SISNRAAVPE

SEQ ID NO: 25170 - protein, 15 aa, Synthetic construct
YCTLVTIAKSLLDLN

SEQ ID NO: 25171 - protein, 55 aa, Synthetic construct
KKGRRSRRCGQCPGCQVPEDCGVCTNCLDKPKFGGRNIKKQCCKMRKCQNLQWMP

SEQ ID NO: 25172 - protein, 15 aa, Synthetic construct
DFSLCHDCAKLFAKG

SEQ ID NO: 25173 - protein, 10 aa, Synthetic construct
RRHWICSACV

SEQ ID NO: 25174 - protein, 5 aa, Synthetic construct
YSLCP

SEQ ID NO: 25175 - protein, 10 aa, Synthetic construct
YEKGNYCPIC

SEQ ID NO: 25176 - protein, 10 aa, Synthetic construct
EWSGDYSLCP

SEQ ID NO: 25177 - protein, 70 aa, Synthetic construct; identical to SEQ ID NO: 20424

SEQ ID NO: 25178 - protein, 10 aa, Synthetic construct
ISGSCKKRWL

SEQ ID NO: 25179 - protein, 10 aa, Synthetic construct
LKKRRFYQLL

SEQ ID NO: 25180 - protein, 40 aa, Synthetic construct
ASKVSKWSTDEVSEFIQSLPGCEEHGKVFKDEQIDGEAFL

SEQ ID NO: 25181 - protein, 5 aa, Synthetic construct
GPALK

SEQ ID NO: 25182 - protein, 70 aa, Synthetic construct; identical to SEQ ID NO: 22907

SEQ ID NO: 25183 - protein, 25 aa, Synthetic construct
HLPPPANSNKPLTPFSIEDILNKPS

SEQ ID NO: 25184 - protein, 25 aa, Synthetic construct
NSGREPRTPRTLLSIADILAPRMVP

SEQ ID NO: 25185 - protein, 10 aa, Synthetic construct
DSPLDLTVRK

SEQ ID NO: 25186 - protein, 10 aa, Synthetic construct
VLDLSTKKSP

SEQ ID NO: 25187 - protein, 10 aa, Synthetic construct
ARKSTRGYFF

SEQ ID NO: 25188 - protein, 5 aa, Synthetic construct
IDEFV

SEQ ID NO: 25189 - protein, 10 aa, Synthetic construct
PGEDDTSSLN

SEQ ID NO: 25190 - protein, 10 aa, Synthetic construct
YHLACFACFS

SEQ ID NO: 25191 - protein, 10 aa, Synthetic construct
CKRQLSTGEE

SEQ ID NO: 25192 - protein, 20 aa, Synthetic construct
RVHYDCMLDNLKREVENGNG

SEQ ID NO: 25193 - protein, 25 aa, Synthetic construct
LRLAMKYIGFLVRLLRDQAAALAAG

SEQ ID NO: 25194 - protein, 10 aa, Synthetic construct
KLARENAAMR

SEQ ID NO: 25195 - protein, 30 aa, Synthetic construct
EALQGFARSVAAARGPATLVAPASVITIVK

SEQ ID NO: 25196 - protein, 5 aa, Synthetic construct
LASEN

SEQ ID NO: 25197 - protein, 10 aa, Synthetic construct
RSPVAPARGP

SEQ ID NO: 25198 - protein, 15 aa, Synthetic construct
TSVITIVKSKTDARS

SEQ ID NO: 25199 - protein, 50 aa, Synthetic construct
EELERQRVELQQEVEKLARENSSMRLELDALRSKYEALQTFARTVARGPV

SEQ ID NO: 25200 - protein, 5 aa, Synthetic construct
ITIVK

SEQ ID NO: 25201 - protein, 10 aa, Synthetic construct
STSVPFSAAS

SEQ ID NO: 25202 - protein, 70 aa, Synthetic construct; identical to SEQ ID NO: 19332

SEQ ID NO: 25203 - protein, 30 aa, Synthetic construct
GDGTQRQRLKTLCKDCRAQRIAFNREQRMF

SEQ ID NO: 25204 - protein, 60 aa, Synthetic construct
RRQNRKCGACAACLRRMDCGRCDFCCDKPKFGGSNQKRQKCRWRQCLQFAMKRLLPSVWS

SEQ ID NO: 25205 - protein, 5 aa, Synthetic construct
MEPQS

SEQ ID NO: 25206 - protein, 10 aa, Synthetic construct
PLDLSMGSRS

SEQ ID NO: 25207 - protein, 25 aa, Synthetic construct
AGKYDVYLINPQGKAFRSKVELIAY

SEQ ID NO: 25208 - protein, 10 aa, Synthetic construct
SLNIKSEPVS

SEQ ID NO: 25209 - protein, 45 aa, Synthetic construct
LARALHELRRFLPPSLAPAGQSLTKIETLRLAIRYIGHLSAVLGL

SEQ ID NO: 25210 - protein, 20 aa, Synthetic construct
NDDLFMMPRIVNVTSLATEG

SEQ ID NO: 25211 - protein, 25 aa, Synthetic construct
FPFVSRTGKTNDFTKIKGWRGKFHS

SEQ ID NO: 25212 - protein, 10 aa, Synthetic construct
SPDAGFPFVS

SEQ ID NO: 25213 - protein, 15 aa, Synthetic construct
NDFTKIKGWRGKFHS

SEQ ID NO: 25214 - protein, 10 aa, Synthetic construct
KYKSSLLNRY

SEQ ID NO: 25215 - protein, 20 aa, Synthetic construct
IQKSSHIAEVKTVKVPLVQQ

SEQ ID NO: 25216 - protein, 15 aa, Synthetic construct
PLLVPKAERLSPPAP

SEQ ID NO: 25217 - protein, 15 aa, Synthetic construct
SIETLLEAARFLEWQ

SEQ ID NO: 25218 - protein, 55 aa, Synthetic construct
NLSVLRTALRYIQSLKRKEKEYEHEMERLAREKIATQQRLAELKHELSQWMDVLE

SEQ ID NO: 25219 - protein, 10 aa, Synthetic construct
EDVFEVEKIL

SEQ ID NO: 25220 - protein, 20 aa, Synthetic construct
YKVRWKGYTSDDDTWEPEIH

SEQ ID NO: 25221 - protein, 15 aa, Synthetic construct
MAEEEHRIKMEVLNK

SEQ ID NO: 25222 - protein, 5 aa, Synthetic construct
RRLDI

SEQ ID NO: 25223 - protein, 10 aa, Synthetic construct
QVEKERLQIE

SEQ ID NO: 25224 - protein, 45 aa, Synthetic construct
VLSKAFSRLKTSLPWVPPDTKLSKLDTLRLASSYIAHLRQLLQED

SEQ ID NO: 25225 - protein, 10 aa, Synthetic construct
MPEKPTTTVR

SEQ ID NO: 25226 - protein, 10 aa, Synthetic construct
QGVIKYMGPA

SEQ ID NO: 25227 - protein, 30 aa, Synthetic construct
SPGDLVWAKMEGYPWWPCLVYNHPFDGTFI

SEQ ID NO: 25228 - protein, 20 aa, Synthetic construct
EPLASNIQVLLQAAEFLERR

SEQ ID NO: 25229 - protein, 20 aa, Synthetic construct
ERVKMINVQRLLEAAEFLER

SEQ ID NO: 25230 - protein, 15 aa, Synthetic construct
SPPETSLPYKWVVEA

SEQ ID NO: 25231 - protein, 10 aa, Synthetic construct
PAVGSSLSEA

SEQ ID NO: 25232 - protein, 25 aa, Synthetic construct
EILRNAIRYIESLQELLREQVENYY

SEQ ID NO: 25233 - protein, 10 aa, Synthetic construct
KRKTTNADRR

SEQ ID NO: 25234 - protein, 60 aa, Synthetic construct
LSKVNEAFETLKRCTSSNPNQRLPKVEILRNAIRYIEGLQALLRDQDAAPPGAAAAFYAP

SEQ ID NO: 25235 - protein, 20 aa, Synthetic construct
DAEAAHMAATAILNLSTRCW

SEQ ID NO: 25236 - protein, 15 aa, Synthetic construct
GTLDLSMHKHRKREN

SEQ ID NO: 25237 - protein, 10 aa, Synthetic construct
LSVLIQVLRP

SEQ ID NO: 25238 - protein, 25 aa, Synthetic construct
LLEQLVSFLSGKDETELAELDRALG

SEQ ID NO: 25239 - protein, 10 aa, Synthetic construct
SIKEEGEDLQ

SEQ ID NO: 25240 - protein, 10 aa, Synthetic construct
EVTIKQEPVS

SEQ ID NO: 25241 - protein, 55 aa, Synthetic construct
NRMHGLNAALDNLRKVVPCYSKTQKLSKIETLRLAKNYIWALSEILRSGKSPDLV

SEQ ID NO: 25242 - protein, 5 aa, Synthetic construct
SQPTT

SEQ ID NO: 25243 - protein, 10 aa, Synthetic construct
NARERNRMHG

SEQ ID NO: 25244 - protein, 40 aa, Synthetic construct
DNLRKVVPCYSKTQKLSKIETLRLAKNYIWALSEILRSGK

SEQ ID NO: 25245 - protein, 55 aa, Synthetic construct
NRMHDLNAALDNLRKVVPCYSKTQKLSKIETLRLAKNYIWALSEILRSGKRPDLV

SEQ ID NO: 25246 - protein, 5 aa, Synthetic construct
SQPTT

SEQ ID NO: 25247 - protein, 70 aa, Synthetic construct; identical to SEQ ID NO: 19963

SEQ ID NO: 25248 - protein, 70 aa, Synthetic construct; identical to SEQ ID NO: 23220

SEQ ID NO: 25249 - protein, 5 aa, Synthetic construct
LKQEE

SEQ ID NO: 25250 - protein, 25 aa, Synthetic construct
RRRRGRTRVRSEALLHSLRRSRRVK

SEQ ID NO: 25251 - protein, 45 aa, Synthetic construct
NLNAALDALRSVLPSFPDDTKLTKIETLRFAYNYIWALAETLRLA

SEQ ID NO: 25252 - protein, 50 aa, Synthetic construct
NLNAALDALREVLPTFPEDAKLTKIETLRFAHNYIWALTETLRLADHCGG

SEQ ID NO: 25253 - protein, 10 aa, Synthetic construct
HNLNSALDAL

SEQ ID NO: 25254 - protein, 25 aa, Synthetic construct
AKLTKIETLRFAHNYIWALTQTLRI

SEQ ID NO: 25255 - protein, 5 aa, Synthetic construct
KTEPT

SEQ ID NO: 25256 - protein, 10 aa, Synthetic construct
PVPAIKTEPT

SEQ ID NO: 25257 - protein, 20 aa, Synthetic construct
NCRKRKLETIVQLERELERL

SEQ ID NO: 25258 - protein, 20 aa, Synthetic construct
MRQQLTELYRDIFQHLRDES

SEQ ID NO: 25259 - protein, 5 aa, Synthetic construct
SVIKH

SEQ ID NO: 25260 - protein, 5 aa, Synthetic construct
IIKQE

SEQ ID NO: 25261 - protein, 20 aa, Synthetic construct
ALPHKLRIKAKAMQIKVEAF

SEQ ID NO: 25262 - protein, 40 aa, Synthetic construct
NLAFAELRKLLPTLPPDKKLSKIEILRLAICYISYLNHVL

SEQ ID NO: 25263 - protein, 40 aa, Synthetic construct
AFAELRKLLPTLPPDKKLSKIEILRLAICYISYLNHVLDV

SEQ ID NO: 25264 - protein, 15 aa, Synthetic construct
PTSFSVLDILDPNKF

SEQ ID NO: 25265 - protein, 20 aa, Synthetic construct
KPRRARTAFTYEQLVALENK

SEQ ID NO: 25266 - protein, 20 aa, Synthetic construct
LTETQVKIWFQNRRTKWKKQ

SEQ ID NO: 25267 - protein, 10 aa, Synthetic construct
GDCKAAEESE

SEQ ID NO: 25268 - protein, 10 aa, Synthetic construct
SRRKPRVLFS

SEQ ID NO: 25269 - protein, 45 aa, Synthetic construct
FKQQRYLSAPEREHLASSLKLTSTQVKIWFQNRRYKCKRQRQDKS

SEQ ID NO: 25270 - protein, 15 aa, Synthetic construct
KVAVKVLVRDDQRQY

SEQ ID NO: 25271 - protein, 10 aa, Synthetic construct
PSYYYPYYCL

SEQ ID NO: 25272 - protein, 35 aa, Synthetic construct
YHSCCNRLGELLGHPSFQVKELALSALLKFVQLEG

SEQ ID NO: 25273 - protein, 10 aa, Synthetic construct
SPFSVEAILA

SEQ ID NO: 25274 - protein, 80 aa, Synthetic construct; identical to SEQ ID NO: 2150

SEQ ID NO: 25275 - protein, 10 aa, Synthetic construct
LLDSMHDLVS

SEQ ID NO: 25276 - protein, 10 aa, Synthetic construct
DLLEFCFYTF

SEQ ID NO: 25277 - protein, 10 aa, Synthetic construct
FQELVLPHFG

SEQ ID NO: 25278 - protein, 40 aa, Synthetic construct
DVQQFYDLLSGSLEVIRKWAEKIPGFAELSPADQDLLLES

SEQ ID NO: 25279 - protein, 10 aa, Synthetic construct
QSSIKVEDIQ

SEQ ID NO: 25280 - protein, 15 aa, Synthetic construct
LLCEAQCCGAFHLEC

SEQ ID NO: 25281 - protein, 10 aa, Synthetic construct
FICNECRTGI

SEQ ID NO: 25282 - protein, 10 aa, Synthetic construct
TARTSSYKAM

SEQ ID NO: 25283 - protein, 15 aa, Synthetic construct
ATKNLSDACKPLKKR

SEQ ID NO: 25284 - protein, 10 aa, Synthetic construct
AASSALGFSK

SEQ ID NO: 25285 - protein, 15 aa, Synthetic construct
TEVVPKKKIKKEQVE

SEQ ID NO: 25286 - protein, 20 aa, Synthetic construct
KTKPRFDFANLALAATQEDP

SEQ ID NO: 25287 - protein, 10 aa, Synthetic construct
GYPNVHEITR

SEQ ID NO: 25288 - protein, 5 aa, Synthetic construct
ALPFT

SEQ ID NO: 25289 - protein, 20 aa, Synthetic construct
DRPRFDFANLAVAATQEDPP

SEQ ID NO: 25290 - protein, 55 aa, Synthetic construct
HAQKVQPPVELFVDWLAVGHVDEFLSFVPAPDGKGFRMLLASPGACFKLFQEKQK

SEQ ID NO: 25291 - protein, 10 aa, Synthetic construct
DIAHGPPAKK

SEQ ID NO: 25292 - protein, 10 aa, Synthetic construct
VTLTMKVASG

SEQ ID NO: 25293 - protein, 10 aa, Synthetic construct
APPEAPITGY

SEQ ID NO: 25294 - protein, 20 aa, Synthetic construct
NTGLLLLSEVALGQCNELLE

SEQ ID NO: 25295 - protein, 10 aa, Synthetic construct
CIVRYLETNK

SEQ ID NO: 25296 - protein, 10 aa, Synthetic construct
YCPMCDVQVH

SEQ ID NO: 25297 - protein, 50 aa, Synthetic construct
EEMRSSYIRELIKAIGLRQKGVVSSSQRFYQLTKLLDNLHDLVKQLHLYC

SEQ ID NO: 25298 - protein, 10 aa, Synthetic construct
QSRALSVEFP

SEQ ID NO: 25299 - protein, 65 aa, Synthetic construct
WNVEDVYEFIRSLPGCQEIAEEFRAQEIDGQALLLLKEDHLMSAMNIKLGPALKIYARISMLKDS

SEQ ID NO: 25300 - protein, 55 aa, Synthetic construct
VWAFIHSLPGCQDIADEFRAQEIDGQALLLLKEDHLMSAMNIKLGPALKICARIN

SEQ ID NO: 25301 - protein, 10 aa, Synthetic construct
TSWVCRQCVF

SEQ ID NO: 25302 - protein, 10 aa, Synthetic construct
LPYGLKGLDW

SEQ ID NO: 25303 - protein, 10 aa, Synthetic construct
SNRQQSYCYC

SEQ ID NO: 25304 - protein, 15 aa, Synthetic construct
EHLATQAEQQEWLCS

SEQ ID NO: 25305 - protein, 45 aa, Synthetic construct
HLSAKQMPSHWDSEQTEKADIKPVIVTDSSVTTSLQTADKTPTPS

SEQ ID NO: 25306 - protein, 10 aa, Synthetic construct
RRRTVEDFNK

SEQ ID NO: 25307 - protein, 5 aa, Synthetic construct
LAYAG

SEQ ID NO: 25308 - protein, 10 aa, Synthetic construct
LGDNSEDADE

SEQ ID NO: 25309 - protein, 10 aa, Synthetic construct
ESDSIMSSAS

SEQ ID NO: 25310 - protein, 10 aa, Synthetic construct
IQCEECQCWQ

SEQ ID NO: 25311 - protein, 20 aa, Synthetic construct
KRKQRRIRTTFTSAQLKELE

SEQ ID NO: 25312 - protein, 35 aa, Synthetic construct
IYTREELALKIDLTEARVQVWFQNRRAKFRKQERA

SEQ ID NO: 25313 - protein, 65 aa, Synthetic construct
KQRRIRTTFTSAQLKELERVFAETHYPDIYTREELALKIDLTEARVQVWFQNRRAKFRKQERAAA

SEQ ID NO: 25314 - protein, 40 aa, Synthetic construct
IQVLRIHLLELEKVNELCKDFCSRYIACLKTKMNSETLLS

SEQ ID NO: 25315 - protein, 80 aa, Synthetic construct; identical to SEQ ID NO: 1847

SEQ ID NO: 25316 - protein, 25 aa, Synthetic construct
VAIYFSDEEWEVLTEQQKALYREVM

SEQ ID NO: 25317 - protein, 20 aa, Synthetic construct
MADTDLFMECEEEELEPWQK

SEQ ID NO: 25318 - protein, 30 aa, Synthetic construct
ACTSCTFVTSVGDAMAKHLVFNPSHRSSSI

SEQ ID NO: 25319 - protein, 20 aa, Synthetic construct
VLTGVMVPAGAVTQPLLIPI

SEQ ID NO: 25320 - protein, 20 aa, Synthetic construct
GLAVWTIPTATVAALPGLTA

SEQ ID NO: 25321 - protein, 20 aa, Synthetic construct
QEDMQAMVQLIRYMHTYCLP

SEQ ID NO: 25322 - protein, 5 aa, Synthetic construct
RPWSR

SEQ ID NO: 25323 - protein, 5 aa, Synthetic construct
SILRE

SEQ ID NO: 25324 - protein, 10 aa, Synthetic construct
VLCDVSKPYR

SEQ ID NO: 25325 - protein, 10 aa, Synthetic construct
SEDYLLLACD

SEQ ID NO: 25326 - protein, 20 aa, Synthetic construct
GSHDNITVMVVFLRDPQELL

SEQ ID NO: 25327 - protein, 25 aa, Synthetic construct
PVTLLDAQSLAQSFFNRLWEVAGQW

SEQ ID NO: 25328 - protein, 80 aa, Synthetic construct; identical to SEQ ID NO: 1912

SEQ ID NO: 25329 - protein, 15 aa, Synthetic construct
SPQNLAAYYTPFPSY

SEQ ID NO: 25330 - protein, 10 aa, Synthetic construct
SLATVEEDFQ

SEQ ID NO: 25331 - protein, 15 aa, Synthetic construct
EPLYDLPWYSKLPPW

SEQ ID NO: 25332 - protein, 20 aa, Synthetic construct
PFDLTTKPKDVKPILPMPKG

SEQ ID NO: 25333 - protein, 10 aa, Synthetic construct
PLDLSIGSRA

SEQ ID NO: 25334 - protein, 15 aa, Synthetic construct
QARPTVFRWTGGGKE

SEQ ID NO: 25335 - protein, 15 aa, Synthetic construct
ARPTVIRWSEGGKEV

SEQ ID NO: 25336 - protein, 15 aa, Synthetic construct
SLSHPWLQEYQTWLD

SEQ ID NO: 25337 - protein, 35 aa, Synthetic construct
IHFSHGEYFYSLFSETINTELLKNLDLAVLELMQS

SEQ ID NO: 25338 - protein, 15 aa, Synthetic construct
LNTSNREVKVYVCKS

SEQ ID NO: 25339 - protein, 45 aa, Synthetic construct
DTSSEASHWKQAAVVLDNPIQVEMGEELVLSIQHHKSNVSITVKQ

SEQ ID NO: 25340 - protein, 25 aa, Synthetic construct
RQLKQQLEDMQKQLRQLQEKFYQIY

SEQ ID NO: 25341 - protein, 25 aa, Synthetic construct
SLEILRKELTRAVSQAVDSVLQKVL

SEQ ID NO: 25342 - protein, 15 aa, Synthetic construct
MKSGFMASFLDFLKS

SEQ ID NO: 25343 - protein, 10 aa, Synthetic construct
PPRHLPTQFN

SEQ ID NO: 25344 - protein, 10 aa, Synthetic construct
LLASSSAAAA

SEQ ID NO: 25345 - protein, 10 aa, Synthetic construct
SPQLYNFSGA

SEQ ID NO: 25346 - protein, 10 aa, Synthetic construct
LPRQDTVIKH

SEQ ID NO: 25347 - protein, 20 aa, Synthetic construct
PSPLEKASRRVLAVVLEDVM

SEQ ID NO: 25348 - protein, 35 aa, Synthetic construct
RKQRRNRTTFNSSQLQALERVFERTHYPDAFVRED

SEQ ID NO: 25349 - protein, 15 aa, Synthetic construct
RVQVWFQNRRAKFRR

SEQ ID NO: 25350 - protein, 45 aa, Synthetic construct
QSINDAFEGLRSHIPTLPYEKRLSKVDTLRLAIGYINFLSELVQA

SEQ ID NO: 25351 - protein, 10 aa, Synthetic construct
KVSLSSDTTR

SEQ ID NO: 25352 - protein, 10 aa, Synthetic construct
ESKKPKWVPP

SEQ ID NO: 25353 - protein, 25 aa, Synthetic construct
PNQSLRLGLSRLARVKPLHPNATST

SEQ ID NO: 25354 - protein, 10 aa, Synthetic construct
KSSSETQIQE

SEQ ID NO: 25355 - protein, 5 aa, Synthetic construct
QPPCL

SEQ ID NO: 25356 - protein, 35 aa, Synthetic construct
SILSKPFKVPIPNYQGPLGSRALGLKRAGVRRALH

SEQ ID NO: 25357 - protein, 15 aa, Synthetic construct
HIKFSEWKFKLFRVR

SEQ ID NO: 25358 - protein, 25 aa, Synthetic construct
VSALMDMEEDILEGMRSQDLDDYLN

SEQ ID NO: 25359 - protein, 20 aa, Synthetic construct
SETGYWITCCPTCDVDINTW

SEQ ID NO: 25360 - protein, 10 aa, Synthetic construct
WITCCPTCDV

SEQ ID NO: 25361 - protein, 70 aa, Synthetic construct; identical to SEQ ID NO: 23007

SEQ ID NO: 25362 - protein, 10 aa, Synthetic construct
GNSYCDECIR

SEQ ID NO: 25363 - protein, 15 aa, Synthetic construct
LHDQLSELLKEFPYG

SEQ ID NO: 25364 - protein, 15 aa, Synthetic construct
ETVYPVIKEGSVCSL

SEQ ID NO: 25365 - protein, 20 aa, Synthetic construct
PAVLPETVYPVIKEGSVCSL

SEQ ID NO: 25366 - protein, 35 aa, Synthetic construct
SSDTLQIDNICSLVEGDTSYNSQIAKIFSSLPLKM

SEQ ID NO: 25367 - protein, 30 aa, Synthetic construct
GDFVCIFCDRSFRKGKDYSKHLNRHLVNVY

SEQ ID NO: 25368 - protein, 10 aa, Synthetic construct
QAQDSHNMQF

SEQ ID NO: 25369 - protein, 5 aa, Synthetic construct
YGSNI

SEQ ID NO: 25370 - protein, 15 aa, Synthetic construct
MVNQHVSVISSIRSL

SEQ ID NO: 25371 - protein, 10 aa, Synthetic construct
YGSNINYPES

SEQ ID NO: 25372 - protein, 20 aa, Synthetic construct
MVNQHVSVISSIRSLPPYSD

SEQ ID NO: 25373 - protein, 10 aa, Synthetic construct
SGRKQTSSFY

SEQ ID NO: 25374 - protein, 10 aa, Synthetic construct
PVACRTPVLA

SEQ ID NO: 25375 - protein, 30 aa, Synthetic construct
QPRTRRTKFTLLQVEELESVFRHTQYPDVP

SEQ ID NO: 25376 - protein, 20 aa, Synthetic construct
VTEDKVRVWFKNKRARCRRH

SEQ ID NO: 25377 - protein, 15 aa, Synthetic construct
AFVLQLEGRKLWRVY

SEQ ID NO: 25378 - protein, 10 aa, Synthetic construct
LEPGDLLYFP

SEQ ID NO: 25379 - protein, 15 aa, Synthetic construct
GELALKQLHYLRPVV

SEQ ID NO: 25380 - protein, 20 aa, Synthetic construct
ERAGVRTYVSTIRIPIRRIL

SEQ ID NO: 25381 - protein, 40 aa, Synthetic construct
VYDKLQEKVELLSRKLNSGDNLIVEEAVQELNSFLAQENM

SEQ ID NO: 25382 - protein, 10 aa, Synthetic construct
QIKQEPIYDL

SEQ ID NO: 25383 - protein, 80 aa, Synthetic construct; identical to SEQ ID NO: 2298

SEQ ID NO: 25384 - protein, 5 aa, Synthetic construct
VKQEN

SEQ ID NO: 25385 - protein, 5 aa, Synthetic construct
GEWFC

SEQ ID NO: 25386 - protein, 10 aa, Synthetic construct
NSNVIIENLQ

SEQ ID NO: 25387 - protein, 10 aa, Synthetic construct
PALMEQLLAL

SEQ ID NO: 25388 - protein, 15 aa, Synthetic construct
IEQIRHQILLLASQN

SEQ ID NO: 25389 - protein, 10 aa, Synthetic construct
IPFIKTEEPA

SEQ ID NO: 25390 - protein, 35 aa, Synthetic construct
LNIPLILEELRVLQQRQIHQMQMTEQICRQVLLLG

SEQ ID NO: 25391 - protein, 70 aa, Synthetic construct; identical to SEQ ID NO: 19597

SEQ ID NO: 25392 - protein, 5 aa, Synthetic construct
KVKEE

SEQ ID NO: 25393 - protein, 25 aa, Synthetic construct
AWLSGPELIALTGLLQMSQGEPRPS

SEQ ID NO: 25394 - protein, 10 aa, Synthetic construct
QDIDTPEVDL

SEQ ID NO: 25395 - protein, 5 aa, Synthetic construct
NTLRR

SEQ ID NO: 25396 - protein, 10 aa, Synthetic construct
PGLNKAQLVE

SEQ ID NO: 25397 - protein, 15 aa, Synthetic construct
VNEKDTLTYFIYSVK

SEQ ID NO: 25398 - protein, 5 aa, Synthetic construct
VFCVV

SEQ ID NO: 25399 - protein, 40 aa, Synthetic construct
SSWTVEDVMQFVREADPQLGPHADLFRKHEIDGKALLLLR

SEQ ID NO: 25400 - protein, 20 aa, Synthetic construct
KLGPALKLSYHIDRLKQGKF

SEQ ID NO: 25401 - protein, 60 aa, Synthetic construct
SITKHPSTWSVEAVVLFLKQTDPLALCPLVDLFRSHEIDGKALLLLTSDVLLKHLGVKLG

SEQ ID NO: 25402 - protein, 10 aa, Synthetic construct
RLKQGKCFEN

SEQ ID NO: 25403 - protein, 70 aa, Synthetic construct; identical to SEQ ID NO: 20082

SEQ ID NO: 25404 - protein, 50 aa, Synthetic construct
RTNSVNTAFTALRTLIPTEPADRKLSKIETLRLASSYISHLGNVLLAGEA

SEQ ID NO: 25405 - protein, 10 aa, Synthetic construct
YYAPYGMPYT

SEQ ID NO: 25406 - protein, 10 aa, Synthetic construct
KKTLQNRFLT

SEQ ID NO: 25407 - protein, 10 aa, Synthetic construct
DSTPKMKMEI

SEQ ID NO: 25408 - protein, 25 aa, Synthetic construct
RVELGKIHFKKHLLHVTSRPLLATT

SEQ ID NO: 25409 - protein, 15 aa, Synthetic construct
TFSSCKKRWIKQALE

SEQ ID NO: 25410 - protein, 80 aa, Synthetic construct; identical to SEQ ID NO: 1909

SEQ ID NO: 25411 - protein, 65 aa, Synthetic construct
WSVADVVRFIRSTDCAPLARIFLDQEIDGQALLLLTLPTVQECMDLKLGPAIKLCHHIERIKFAF

SEQ ID NO: 25412 - protein, 30 aa, Synthetic construct
LDLTYWKRQKICCGIIYKGRFGEVLIDTHL

SEQ ID NO: 25413 - protein, 60 aa, Synthetic construct
CFKERTRSLLREWYLQDPYPNPSKKRELAQATGLTPTQVGNWFKNRRQRDRAAAAKNRLQ

SEQ ID NO: 25414 - protein, 15 aa, Synthetic construct
SYPDVSLEEQEKMDL

SEQ ID NO: 25415 - protein, 55 aa, Synthetic construct
QVMFQCLWKSCGKVLSTASAMQRHIRLVHLGRQAEPEQSDGEEDFYYTELDVGVD

SEQ ID NO: 25416 - protein, 40 aa, Synthetic construct
DLKDAKLQTLKELFPQRSDNDLLKLIESTSTMDGAIAAAL

SEQ ID NO: 25417 - protein, 10 aa, Synthetic construct
VVCDRCLLGK

SEQ ID NO: 25418 - protein, 10 aa, Synthetic construct
GKVKKEQQDG

SEQ ID NO: 25419 - protein, 15 aa, Synthetic construct
LDPNMPVIVNTCSLR

SEQ ID NO: 25420 - protein, 15 aa, Synthetic construct
DPNMPVIVNTCSLRE

SEQ ID NO: 25421 - protein, 10 aa, Synthetic construct
LGHPATLFGT

SEQ ID NO: 25422 - protein, 15 aa, Synthetic construct
FHHPYFLPGPHYFPS

SEQ ID NO: 25423 - protein, 10 aa, Synthetic construct
SRPPFGYGNF

SEQ ID NO: 25424 - protein, 10 aa, Synthetic construct
GPPRPHIKTE

SEQ ID NO: 25425 - protein, 10 aa, Synthetic construct
DIRIKEEEPD

SEQ ID NO: 25426 - protein, 10 aa, Synthetic construct
VCPECSKRFM

SEQ ID NO: 25427 - protein, 15 aa, Synthetic construct
EQGLSAFYLSYFDML

SEQ ID NO: 25428 - protein, 25 aa, Synthetic construct
KIEADMMKLQTQITSMESNLKTIEE

SEQ ID NO: 25429 - protein, 15 aa, Synthetic construct
SLLKELAGLSQALIS

SEQ ID NO: 25430 - protein, 10 aa, Synthetic construct
QMYDDYYYYG

SEQ ID NO: 25431 - protein, 10 aa, Synthetic construct
YGYEDYYDYY

SEQ ID NO: 25432 - protein, 5 aa, Synthetic construct
YEDPY

SEQ ID NO: 25433 - protein, 10 aa, Synthetic construct
CQDIELCPEC

SEQ ID NO: 25434 - protein, 5 aa, Synthetic construct
WICPG

SEQ ID NO: 25435 - protein, 35 aa, Synthetic construct
HPPDKKLSKNEILRLAMKYINFLAKLLNDQEEEGT

SEQ ID NO: 25436 - protein, 40 aa, Synthetic construct
MSITSDEVNFLVYRYLQESGFSHSAFTFGIESHISQSNIN

SEQ ID NO: 25437 - protein, 10 aa, Synthetic construct
GLQYVEAEIS

SEQ ID NO: 25438 - protein, 10 aa, Synthetic construct
INEDGTVFDG

SEQ ID NO: 25439 - protein, 40 aa, Synthetic construct; identical to SEQ ID NO: 25436

SEQ ID NO: 25440 - protein, 10 aa, Synthetic construct
TVFDSRPIES

SEQ ID NO: 25441 - protein, 20 aa, Synthetic construct
GTDKELSDLLDFSAMFSPPV

SEQ ID NO: 25442 - protein, 50 aa, Synthetic construct
SVNTAFTALRTLIPTEPVDRKLSKIETVRLASSYIAHLANVLLLGDSADD

SEQ ID NO: 25443 - protein, 45 aa, Synthetic construct
MRVLSKAFSRLKTTLPWVPPDTKLSKLDTLRLASSYIAHLRQILA

SEQ ID NO: 25444 - protein, 50 aa, Synthetic construct
LRQAFLALQAALPAVPPDTKLSKLDVLVLAASYIAHLTRTLGHELPGPAW

SEQ ID NO: 25445 - protein, 45 aa, Synthetic construct
HAFLELQRTLPSVPPDTKLSKLDVLLLATTYIAHLTRSLQDDAEA

SEQ ID NO: 25446 - protein, 20 aa, Synthetic construct
TDKELSDLLDFSAMFSPPVS

SEQ ID NO: 25447 - protein, 20 aa, Synthetic construct
VWSPDIEQSFQEALAIYPPC

SEQ ID NO: 25448 - protein, 40 aa, Synthetic construct
GKMYGRNELIARYIKLRTGKTRTRKQVSSHIQVLARRKAR

SEQ ID NO: 25449 - protein, 65 aa, Synthetic construct
HRARKRQAWLWEEDKNLRSGVRKYGEGNWSKILLHYKFNNRTSVMLKDRWRTMKKLKLISSDSED

SEQ ID NO: 25450 - protein, 25 aa, Synthetic construct
LLSLMKDRRLTLEQVVAIEALTQLS

SEQ ID NO: 25451 - protein, 5 aa, Synthetic construct
HETSE

SEQ ID NO: 25452 - protein, 15 aa, Synthetic construct
SCHSQMHRPIKVEPG

SEQ ID NO: 25453 - protein, 5 aa, Synthetic construct
VYSYH

SEQ ID NO: 25454 - protein, 10 aa, Synthetic construct
PSFSYYGFPS

SEQ ID NO: 25455 - protein, 30 aa, Synthetic construct
SALSIAKEKNISLQTAIAIEALTQLSSALP

SEQ ID NO: 25456 - protein, 15 aa, Synthetic construct
FSGFQLLVDVALKRA

SEQ ID NO: 25457 - protein, 10 aa, Synthetic construct
SFQLLVEVAL

SEQ ID NO: 25458 - protein, 15 aa, Synthetic construct
FLLLVDAAVQRAAEL

SEQ ID NO: 25459 - protein, 10 aa, Synthetic construct
AGAYIQNEHS

SEQ ID NO: 25460 - protein, 25 aa, Synthetic construct
ALLWKRRAEAALDALDKAQRQLQAC

SEQ ID NO: 25461 - protein, 5 aa, Synthetic construct
LTKLQ

SEQ ID NO: 25462 - protein, 35 aa, Synthetic construct
DDSSDNCVIVGFVKPLAERTPELVELSSDSEDLGS

SEQ ID NO: 25463 - protein, 10 aa, Synthetic construct
VVRRCPHHER

SEQ ID NO: 25464 - protein, 25 aa, Synthetic construct
QHLIRVEGNLRVEYLDDRNTFRHSV

SEQ ID NO: 25465 - protein, 25 aa, Synthetic construct
SDCTTIHYNYMCNSSCMGGMNRRPI

SEQ ID NO: 25466 - protein, 25 aa, Synthetic construct
TLQIRGRERFEMFRELNEALELKDA

SEQ ID NO: 25467 - protein, 45 aa, Synthetic construct
KRRSPDDELLYLPVRGRETYEMLLKIKESLELMQYLPQHTIETYR

SEQ ID NO: 25468 - protein, 15 aa, Synthetic construct
APGHVSVIRPPQNLY

SEQ ID NO: 25469 - protein, 5 aa, Synthetic construct
KQEPG

SEQ ID NO: 25470 - protein, 5 aa, Synthetic construct
VCQDC

SEQ ID NO: 25471 - protein, 10 aa, Synthetic construct
EPKIDFRVYN

SEQ ID NO: 25472 - protein, 45 aa, Synthetic construct
QSLNEAFAALRKIIPTLPSDKLSKIQTLKLAARYIDFLYQVLQSD

SEQ ID NO: 25473 - protein, 45 aa, Synthetic construct
SLNEAFAALRKIIPTLPSDKLSKIQTLKLAARYIDFLYQVLQSDE

SEQ ID NO: 25474 - protein, 30 aa, Synthetic construct
AAAAVRITLTLFEPDHKRCPEFFYPELVKN

SEQ ID NO: 25475 - protein, 10 aa, Synthetic construct
CVLCMECFLG

SEQ ID NO: 25476 - protein, 10 aa, Synthetic construct
LCDECNVAYH

SEQ ID NO: 25477 - protein, 5 aa, Synthetic construct
YWYCP

SEQ ID NO: 25478 - protein, 20 aa, Synthetic construct
PKASPFSVESLLSDSPPRRK

SEQ ID NO: 25479 - protein, 15 aa, Synthetic construct
HFLLYPITQPLGFLV

SEQ ID NO: 25480 - protein, 15 aa, Synthetic construct
DQDSSTFPGCINNAT

SEQ ID NO: 25481 - protein, 35 aa, Synthetic construct
KEGLVEGEDYVLLPAAAWHYLVSWYGLEHGQPPIE

SEQ ID NO: 25482 - protein, 35 aa, Synthetic construct
EEKPSVWLCLKCGHQGCGRNSQEQHALKHYLTPRS

SEQ ID NO: 25483 - protein, 60 aa, Synthetic construct
RKKRRHRTVFTAHQLEELEKAFSEAHYPDVYAREMLAVKTELPEDRIQVWFQNRRAKWRK

SEQ ID NO: 25484 - protein, 35 aa, Synthetic construct
FVGNIYTLKCRFCEVEFQGPLSIQEEWVRHLQRHI

SEQ ID NO: 25485 - protein, 20 aa, Synthetic construct
AVEATQGQQQQLRGMVPIVL

SEQ ID NO: 25486 - protein, 10 aa, Synthetic construct
SLSVGTSSAK

SEQ ID NO: 25487 - protein, 15 aa, Synthetic construct
LEVTVGDLTVIITDF

SEQ ID NO: 25488 - protein, 5 aa, Synthetic construct
IKQEP

SEQ ID NO: 25489 - protein, 45 aa, Synthetic construct
AAAPEGDWARLLEQMGALAVRGSRRERELERRELAVEQGERALER

SEQ ID NO: 25490 - protein, 10 aa, Synthetic construct
AAAQARRELQ

SEQ ID NO: 25491 - protein, 5 aa, Synthetic construct
KVEML

SEQ ID NO: 25492 - protein, 10 aa, Synthetic construct
LRSLKEAMVS

SEQ ID NO: 25493 - protein, 5 aa, Synthetic construct
TGLMS

SEQ ID NO: 25494 - protein, 15 aa, Synthetic construct
YKKTLLLRHHVSTEH

SEQ ID NO: 25495 - protein, 5 aa, Synthetic construct
KEEPD

SEQ ID NO: 25496 - protein, 15 aa, Synthetic construct
GGRHPGVAEVKTEMM

SEQ ID NO: 25497 - protein, 10 aa, Synthetic construct
SVITSARELH

SEQ ID NO: 25498 - protein, 35 aa, Synthetic construct
SGMKTYGCELCGKRFLDSLRLRMHLLAHSAGAKAF

SEQ ID NO: 25499 - protein, 10 aa, Synthetic construct
TIMPIITESF

SEQ ID NO: 25500 - protein, 25 aa, Synthetic construct
QMLYSCVVCKRSYVTLSSLRRHANV

SEQ ID NO: 25501 - protein, 15 aa, Synthetic construct
SAPSVIVHSSQFSSV

SEQ ID NO: 25502 - protein, 10 aa, Synthetic construct
VITYTAPPRP

SEQ ID NO: 25503 - protein, 15 aa, Synthetic construct
EESDQALDLSLKSGP

SEQ ID NO: 25504 - protein, 10 aa, Synthetic construct
LVKDERDSLS

SEQ ID NO: 25505 - protein, 5 aa, Synthetic construct
IKQEA

SEQ ID NO: 25506 - protein, 20 aa, Synthetic construct
GHLGVIRDFSIESLLRENLY

SEQ ID NO: 25507 - protein, 25 aa, Synthetic construct
SLSPFAPDFFPHLWPGDFGAFAQLP

SEQ ID NO: 25508 - protein, 15 aa, Synthetic construct
YRLCNECLAEFGIDS

SEQ ID NO: 25509 - protein, 20 aa, Synthetic construct
DQQKGEISGFGQCLVWVQCS

SEQ ID NO: 25510 - protein, 15 aa, Synthetic construct
CGNIDPSVLPDNWSC

SEQ ID NO: 25511 - protein, 10 aa, Synthetic construct
VQYNRCDIPE

SEQ ID NO: 25512 - protein, 15 aa, Synthetic construct
LESDVAYASYIPGSI

SEQ ID NO: 25513 - protein, 5 aa, Synthetic construct
KTEPV

SEQ ID NO: 25514 - protein, 5 aa, Synthetic construct
FNPTL

SEQ ID NO: 25515 - protein, 20 aa, Synthetic construct
QQQHLLFPFYIPSAEFQLNP

SEQ ID NO: 25516 - protein, 10 aa, Synthetic construct
LLTSQFLPYF

SEQ ID NO: 25517 - protein, 5 aa, Synthetic construct
FLFPF

SEQ ID NO: 25518 - protein, 10 aa, Synthetic construct
LAAQNQFLHS

SEQ ID NO: 25519 - protein, 5 aa, Synthetic construct
YMIFD

SEQ ID NO: 25520 - protein, 10 aa, Synthetic construct
EVEVKEEENE

SEQ ID NO: 25521 - protein, 5 aa, Synthetic construct
LFRLQ

SEQ ID NO: 25522 - protein, 15 aa, Synthetic construct
TDQRDYICEYCARAF

SEQ ID NO: 25523 - protein, 15 aa, Synthetic construct
CKSCGIWYRSERNLQ

SEQ ID NO: 25524 - protein, 10 aa, Synthetic construct
YCSGRQREAA

SEQ ID NO: 25525 - protein, 20 aa, Synthetic construct
QCTKSFSNARALEMHLNSHS

SEQ ID NO: 25526 - protein, 10 aa, Synthetic construct
KMVYMTVNDS

SEQ ID NO: 25527 - protein, 10 aa, Synthetic construct
VYMEVIVGEE

SEQ ID NO: 25528 - protein, 5 aa, Synthetic construct
PIAWA

SEQ ID NO: 25529 - protein, 10 aa, Synthetic construct
EVYMEVIVGE

SEQ ID NO: 25530 - protein, 10 aa, Synthetic construct
RLQPPGTPSA

SEQ ID NO: 25531 - protein, 35 aa, Synthetic construct
PRKQLNPCRGTERVDPGFEGVTLKFQIKPDSSLQI

SEQ ID NO: 25532 - protein, 10 aa, Synthetic construct
LPCSSRSQES

SEQ ID NO: 25533 - protein, 30 aa, Synthetic construct
VQLEDTTSCKTFCSLSCLSSYEEKRKPFVT

SEQ ID NO: 25534 - protein, 20 aa, Synthetic construct
NLCSNACLSKFHSANNFIMN

SEQ ID NO: 25535 - protein, 20 aa, Synthetic construct
LFCSINCFSAYSKAKMESSS

SEQ ID NO: 25536 - protein, 10 aa, Synthetic construct
LFCSINCFSA

SEQ ID NO: 25537 - protein, 10 aa, Synthetic construct
FCSEDCKSKY

SEQ ID NO: 25538 - protein, 50 aa, Synthetic construct
NTLLFFNTKYFQLKNVTEHLKLSFAHVMRRTRTLKYSTKMTYLRFFPPLQ

SEQ ID NO: 25539 - protein, 10 aa, Synthetic construct
VGKRKRNEDD

SEQ ID NO: 25540 - protein, 10 aa, Synthetic construct
NSFASNIRIK

SEQ ID NO: 25541 - protein, 10 aa, Synthetic construct
SCKTSAIPQY

SEQ ID NO: 25542 - protein, 20 aa, Synthetic construct
NFCSYSCVVAFQNLFNKPTG

SEQ ID NO: 25543 - protein, 5 aa, Synthetic construct
LKNKA

SEQ ID NO: 25544 - protein, 10 aa, Synthetic construct
ATSCKPHTQN

SEQ ID NO: 25545 - protein, 10 aa, Synthetic construct
VVPVPVPVFV

SEQ ID NO: 25546 - protein, 10 aa, Synthetic construct
DKIKEEPDNA

SEQ ID NO: 25547 - protein, 10 aa, Synthetic construct
PVITSVMSLA

SEQ ID NO: 25548 - protein, 15 aa, Synthetic construct
RTDTTPVITSVMSLA

SEQ ID NO: 25549 - protein, 5 aa, Synthetic construct
PECYL

SEQ ID NO: 25550 - protein, 15 aa, Synthetic construct
DSDSESELVIDLGED

SEQ ID NO: 25551 - protein, 10 aa, Synthetic construct
TASADVAADI

SEQ ID NO: 25552 - protein, 20 aa, Synthetic construct
KMMDAIKGTMTEIYNDLSKN

SEQ ID NO: 25553 - protein, 10 aa, Synthetic construct
RLRIEIEKLQ

SEQ ID NO: 25554 - protein, 40 aa, Synthetic construct
EPLTFKDVAIEFSLEEWQCLDTAQRDLYRNVLLENYRNLV

SEQ ID NO: 25555 - protein, 35 aa, Synthetic construct
HCTLCDLWFMQGNELRRHLSDAHNISERLVTEEVL

SEQ ID NO: 25556 - protein, 40 aa, Synthetic construct
GPLTFMDVAIEFSLEEWQCLDTAQRNVYRHVMLENYRNLV

SEQ ID NO: 25557 - protein, 20 aa, Synthetic construct
RRTGCPPALLGKDVPPLSSF

SEQ ID NO: 25558 - protein, 35 aa, Synthetic construct
FKDVAVVFTEEELGLLDPAQRKLYRDVMLENFRNL

SEQ ID NO: 25559 - protein, 25 aa, Synthetic construct
HFACKECGDTFRLKVLLVQHQRVHS

SEQ ID NO: 25560 - protein, 10 aa, Synthetic construct
ISNSKPVVSN

SEQ ID NO: 25561 - protein, 10 aa, Synthetic construct
NRVTPGSWSR

SEQ ID NO: 25562 - protein, 15 aa, Synthetic construct
NSSRVSVISGPQNTR

SEQ ID NO: 25563 - protein, 10 aa, Synthetic construct
PCKESETFVQ

SEQ ID NO: 25564 - protein, 35 aa, Synthetic construct
DNVKIVLDKNLKDCTELVLKQLQEMKPTVSLKKLE

SEQ ID NO: 25565 - protein, 30 aa, Synthetic construct
LTCGRCLQTFPLEAITAFMDHKKLGCQLFR

SEQ ID NO: 25566 - protein, 50 aa, Synthetic construct
KCPDCEKRFKYASDLQRHRRVHTGEKPYKCPNCDKAFKQREHLNKHQGVH

SEQ ID NO: 25567 - protein, 70 aa, Synthetic construct; identical to SEQ ID NO: 20887

SEQ ID NO: 25568 - protein, 30 aa, Synthetic construct
QDFIENLLQRVELAEKQLEYYQSQQASGFV

SEQ ID NO: 25569 - protein, 10 aa, Synthetic construct
QIPVSPHIYT

SEQ ID NO: 25570 - protein, 15 aa, Synthetic construct
ISQIIVTEELVQAMV

SEQ ID NO: 25571 - protein, 40 aa, Synthetic construct
AFTQLTFRDVAIEFSQDEWKCLNSTQRTLYRDVMLENYRN

SEQ ID NO: 25572 - protein, 20 aa, Synthetic construct
CAGLRCPECSVKFESAEDLE

SEQ ID NO: 25573 - protein, 30 aa, Synthetic construct
GTYHCTECEDSFDNLGELHGHFMLHARGEV

SEQ ID NO: 25574 - protein, 25 aa, Synthetic construct
NEDDIQFVSEGPLRPVLEYIDLVSS

SEQ ID NO: 25575 - protein, 40 aa, Synthetic construct
PLTFRDVAIEFSLEEWQCLDTAQQDLYRKVMLENYRNLVF

SEQ ID NO: 25576 - protein, 10 aa, Synthetic construct
AFHPKQEVPV

SEQ ID NO: 25577 - protein, 15 aa, Synthetic construct
APDLMPLDLSARSTR

SEQ ID NO: 25578 - protein, 10 aa, Synthetic construct
PLDLSARSTR

SEQ ID NO: 25579 - protein, 5 aa, Synthetic construct
CPYCS

SEQ ID NO: 25580 - protein, 40 aa, Synthetic construct
SIRSNLVFLSRSGRTGPPPALGGKECQPLLLARFTRTQVP

SEQ ID NO: 25581 - protein, 35 aa, Synthetic construct
DSIRTLRLFPFSSKQLVKCPRRNQPVVVLNHPDAD

SEQ ID NO: 25582 - protein, 15 aa, Synthetic construct
PRITSVFSLQSQQAS

SEQ ID NO: 25583 - protein, 10 aa, Synthetic construct
PVQPGMPLTV

SEQ ID NO: 25584 - protein, 25 aa, Synthetic construct
NCLAQLIDVKVVNGTQQLVLKLFPL

SEQ ID NO: 25585 - protein, 15 aa, Synthetic construct
TNDGPVISSVFSLSS

SEQ ID NO: 25586 - protein, 10 aa, Synthetic construct
PRRNQPVIVL

SEQ ID NO: 25587 - protein, 10 aa, Synthetic construct
VINKYKGNVL

SEQ ID NO: 25588 - protein, 15 aa, Synthetic construct
SQCVFKCWFCGRLYE

SEQ ID NO: 25589 - protein, 15 aa, Synthetic construct
RHLIEATRDWDVLSS

SEQ ID NO: 25590 - protein, 25 aa, Synthetic construct
KTRCSSCNVKFESESELQNHIQTIH

SEQ ID NO: 25591 - protein, 80 aa, Synthetic construct; identical to SEQ ID NO: 2043

SEQ ID NO: 25592 - protein, 10 aa, Synthetic construct
KRVKREPEEV

SEQ ID NO: 25593 - protein, 30 aa, Synthetic construct
HSSPQNPLLDCSLCGKVFSSASSLSKHYLT

SEQ ID NO: 25594 - protein, 10 aa, Synthetic construct
HLTGHMLTHQ

SEQ ID NO: 25595 - protein, 10 aa, Synthetic construct
KTKPFVCIEQ

SEQ ID NO: 25596 - protein, 30 aa, Synthetic construct
GTFACTECGQDFAQEAGLHQHYIRHARGEL

SEQ ID NO: 25597 - protein, 45 aa, Synthetic construct
LEFQSHIPQHQVDSSTAQCLLCGLCYTSASSLSRHLFIVHKVRDQ

SEQ ID NO: 25598 - protein, 10 aa, Synthetic construct
AKFPVPELHM

SEQ ID NO: 25599 - protein, 10 aa, Synthetic construct
KKEPKPEPLP

SEQ ID NO: 25600 - protein, 15 aa, Synthetic construct
DVPAVSVIVKNTSRQ

SEQ ID NO: 25601 - protein, 5 aa, Synthetic construct
HNGFR

SEQ ID NO: 25602 - protein, 80 aa, Synthetic construct; identical to SEQ ID NO: 1986

SEQ ID NO: 25603 - protein, 40 aa, Synthetic construct
ELVTFRDVAIEFSPEEWKCLDPAQQNLYRDVMLENYRNLV

SEQ ID NO: 25604 - protein, 40 aa, Synthetic construct
GRLTFRDVAIEFSLAEWKCLNPSQRALYREVMLENYRNLE

SEQ ID NO: 25605 - protein, 15 aa, Synthetic construct
SGSTQGMKIKKESEE

SEQ ID NO: 25606 - protein, 5 aa, Synthetic construct
YIQYL

SEQ ID NO: 25607 - protein, 10 aa, Synthetic construct
PVLMHSYPGA

SEQ ID NO: 25608 - protein, 10 aa, Synthetic construct
FHYPVYGKMS

SEQ ID NO: 25609 - protein, 25 aa, Synthetic construct
WHETEEGVLVVNVTWRNKTYVGTLL

SEQ ID NO: 25610 - protein, 35 aa, Synthetic construct
DISSPCEQIMVRTRSVGVNTCDVALATEPECLGPC

SEQ ID NO: 25611 - protein, 5 aa, Synthetic construct
LVVNV

SEQ ID NO: 25612 - protein, 10 aa, Synthetic construct
LLDCTRHDWA

SEQ ID NO: 25613 - protein, 25 aa, Synthetic construct
TEDGMLVVNVTWRNKTYVGTLLDCT

SEQ ID NO: 25614 - protein, 30 aa, Synthetic construct
FEDVAVYFTQNEWASLHPTQRALYREVMLE

SEQ ID NO: 25615 - protein, 10 aa, Synthetic construct
TSLYPTAGGF

SEQ ID NO: 25616 - protein, 25 aa, Synthetic construct
HKSPICVLNEMMQNEEKYEKILKAL

SEQ ID NO: 25617 - protein, 5 aa, Synthetic construct
RCRFC

SEQ ID NO: 25618 - protein, 15 aa, Synthetic construct
QEDWIKHLQRHIVNA

SEQ ID NO: 25619 - protein, 40 aa, Synthetic construct
ALPQGQLTFKDVAIEFSQEEWTCLDPAQKTLYRDVMLENY

SEQ ID NO: 25620 - protein, 40 aa, Synthetic construct
DSVSFEDVAVAFTQEEWALLDPSQKNLYRDVMQEIFRNLA

SEQ ID NO: 25621 - protein, 15 aa, Synthetic construct
ALLTPKTEPEELAVS

SEQ ID NO: 25622 - protein, 25 aa, Synthetic construct
IAHPRHEADEKPFICAQCGKTFNNT

SEQ ID NO: 25623 - protein, 30 aa, Synthetic construct
TGEKPYKCSECGKSFSRSSNRIRHERIHLE

SEQ ID NO: 25624 - protein, 45 aa, Synthetic construct
QWCLLKERLGFSLHSQLAKFLLDRYTSSGCVLCAGPEPLPPKGLQ

SEQ ID NO: 25625 - protein, 35 aa, Synthetic construct
AVSLLPPADPLRQANRLPIRVLKMLSAHTGHLLHP

SEQ ID NO: 25626 - protein, 10 aa, Synthetic construct
SPLALLAQTC

SEQ ID NO: 25627 - protein, 35 aa, Synthetic construct
GPLTFMDVAIEFSLEEWQCLDTAQQNLYRNVMLEN

SEQ ID NO: 25628 - protein, 45 aa, Synthetic construct
ESVTFRDVTVDFTQEEWQQLEPAQKDLYRDVMLENYRNLVSLDWE

SEQ ID NO: 25629 - protein, 40 aa, Synthetic construct
ELLTFKDVAIEFSPEEWKCLDTSQQNLYRDVMLENYRNLV

SEQ ID NO: 25630 - protein, 10 aa, Synthetic construct
LATIYSPYLL

SEQ ID NO: 25631 - protein, 10 aa, Synthetic construct
AGSSPECDAP

SEQ ID NO: 25632 - protein, 10 aa, Synthetic construct
YDHYRFFQQY

SEQ ID NO: 25633 - protein, 40 aa, Synthetic construct
AFSQGLLTFRDVAIEFSQEEWKCLDPAQRTLYRDVMLENY

SEQ ID NO: 25634 - protein, 10 aa, Synthetic construct
EPLDLVLVPD

SEQ ID NO: 25635 - protein, 10 aa, Synthetic construct
LIEIQVVKVT

SEQ ID NO: 25636 - protein, 15 aa, Synthetic construct
PGSFHCALCPAAFRL

SEQ ID NO: 25637 - protein, 10 aa, Synthetic construct
FHEHGHLAGA

SEQ ID NO: 25638 - protein, 10 aa, Synthetic construct
NSDFAHLIPL

SEQ ID NO: 25639 - protein, 25 aa, Synthetic construct
APPSIPSPKHSFLAYLGLRERAETV

SEQ ID NO: 25640 - protein, 5 aa, Synthetic construct
IKEEP

SEQ ID NO: 25641 - protein, 45 aa, Synthetic construct
ALPQGSLTFRDVAVEFSQEEWKCLDPVQKALYRDVMLENYRNLGF

SEQ ID NO: 25642 - protein, 5 aa, Synthetic construct
AVVVA

SEQ ID NO: 25643 - protein, 10 aa, Synthetic construct
VVQELMVLPA

SEQ ID NO: 25644 - protein, 10 aa, Synthetic construct
VAAPAVVAIP

SEQ ID NO: 25645 - protein, 40 aa, Synthetic construct
ALPQGLLTFRDVAIEFSQEEWKCLDPAQRTLYRDVMLENY

SEQ ID NO: 25646 - protein, 40 aa, Synthetic construct
LTDDSINPPALVHVHMQGQEALFSEDMPLRDVIVHLTKQV

SEQ ID NO: 25647 - protein, 10 aa, Synthetic construct
ERPFVCPECQ

SEQ ID NO: 25648 - protein, 20 aa, Synthetic construct
NRRPKKWSVVTFHGKEYIVQ

SEQ ID NO: 25649 - protein, 60 aa, Synthetic construct
ISHVNFRMFSCPKESDPIQALRKLTELCHLWLRPDLHTKEQILDMLVMEQFMISMPQELQ

SEQ ID NO: 25650 - protein, 25 aa, Synthetic construct
TCHVNFRMFSCPKESDPIQALRKLT

SEQ ID NO: 25651 - protein, 20 aa, Synthetic construct
LHTKEQILDMLVMEQFMISM

SEQ ID NO: 25652 - protein, 80 aa, Synthetic construct
KLPEDIMKLLEQSEWQPTNVDGKGYLLNEPFSCKEEPEIDSPGGDIGLSLQRVFTDLKNMDATWLDSLLTGWRRATRSFR

SEQ ID NO: 25653 - protein, 80 aa, Synthetic construct
KLPEDIMKLLEQSEWQPTNVDGKGYLLNEPGVCKEEPEIDSPGGDIGLSLQRVFTDLKNMDATWLDSLLTGWRRATRSFR

SEQ ID NO: 25654 - protein, 80 aa, Synthetic construct
KLPEDIMKLLEQSEWQPTNVDGKGYLLNEPGVQPEEPEIDSPGGDIGLSLQRVFTDLKNMDATWLDSLLTGWRRATRSFR

SEQ ID NO: 25655 - protein, 80 aa, Synthetic construct
KLPEDIMKLLEQSEWQPTNVDGKGYLLNEPGVQPTSPEIDSPGGDIGLSLQRVFTDLKNMDATWLDSLLTGWRRATRSFR

SEQ ID NO: 25656 - protein, 80 aa, Synthetic construct
KLPEDIMKLLEQSEWQPTNVDGKGYLLNEPGVQPTSVYIDSPGGDIGLSLQRVFTDLKNMDATWLDSLLTGWRRATRSFR

SEQ ID NO: 25657 - protein, 80 aa, Synthetic construct
KLPEDIMKLLEQSEWQPTNVDGKGYLLNEPGVQPTSVYGDSPGGDIGLSLQRVFTDLKNMDATWLDSLLTGWRRATRSFR

SEQ ID NO: 25658 - protein, 80 aa, Synthetic construct
KLPEDIMKLLEQSEWQPTNVDGKGYLLNEPGVQPTSVYGDFSGGDIGLSLQRVFTDLKNMDATWLDSLLTGWRRATRSFR

SEQ ID NO: 25659 - protein, 80 aa, Synthetic construct
KLPEDIMKLLEQSEWQPTNVDGKGYLLNEPGVQPTSVYGDFSCKDIGLSLQRVFTDLKNMDATWLDSLLTGWRRATRSFR

SEQ ID NO: 25660 - protein, 80 aa, Synthetic construct
KLPEDIMKLLEQSEWQPTNVDGKGYLLNEPGVQPTSVYGDFSCKEEGLSLQRVFTDLKNMDATWLDSLLTGWRRATRSFR

SEQ ID NO: 25661 - protein, 80 aa, Synthetic construct
KLPEDIMKLLEQSEWQPTNVDGKGYLLNEPGVQPTSVYGDFSCKEEPESLQRVFTDLKNMDATWLDSLLTGWRRATRSFR

SEQ ID NO: 25662 - protein, 80 aa, Synthetic construct
KLPEDIMKLLEQSEWQPTNVDGKGYLLNEPGVQPTSVYGDFSCKEEPEIDQRVFTDLKNMDATWLDSLLTGWRRATRSFR

SEQ ID NO: 25663 - protein, 80 aa, Synthetic construct
KLPEDIMKLLEQSEWQPTNVDGKGYLLNEPGVQPTSVYGDFSCKEEPEIDSPGGDIGLSLDATWLDSLLTGWRRATRSFR

SEQ ID NO: 25664 - protein, 80 aa, Synthetic construct
CYSNYPFPLTNSSEPFYQQLPLEPPAAKTGCPPLWPNPAGNLYEEKVHVDFNSYVQSPAYHSPQEDPFLFGWRRATRSFR

SEQ ID NO: 25665 - protein, 80 aa, Synthetic construct
CYSNYPFPLTSWPCSFSPSQNSSEPFYQQLPLEPPANPAGNLYEEKVHVDFNSYVQSPAYHSPQEDPFLFGWRRATRSFR

SEQ ID NO: 25666 - protein, 80 aa, Synthetic construct
CYSNYPFPLTSWPCSFSPSQNSSEPFYQQLPLEPPAAKAGNLYEEKVHVDFNSYVQSPAYHSPQEDPFLFGWRRATRSFR

SEQ ID NO: 25667 - protein, 80 aa, Synthetic construct
CYSNYPFPLTSWPCSFSPSQNSSEPFYQQLPLEPPAAKTGCPYEEKVHVDFNSYVQSPAYHSPQEDPFLFGWRRATRSFR

SEQ ID NO: 25668 - protein, 80 aa, Synthetic construct
CYSNYPFPLTSWPCSFSPSQNSSEPFYQQLPLEPPAAKTGCPPLEKVHVDFNSYVQSPAYHSPQEDPFLFGWRRATRSFR

SEQ ID NO: 25669 - protein, 80 aa, Synthetic construct
CYSNYPFPLTSWPCSFSPSQNSSEPFYQQLPLEPPAAKTGCPPLWPNPVDFNSYVQSPAYHSPQEDPFLFGWRRATRSFR

SEQ ID NO: 25670 - protein, 80 aa, Synthetic construct
CYSNYPFPLTSWPCSFSPSQNSSEPFYQQLPLEPPAAKTGCPPLWPNPAGFNSYVQSPAYHSPQEDPFLFGWRRATRSFR

SEQ ID NO: 25671 - protein, 80 aa, Synthetic construct
CYSNYPFPLTSWPCSFSPSQNSSEPFYQQLPLEPPAAKTGCPPLWPNPAGNLSYVQSPAYHSPQEDPFLFGWRRATRSFR

SEQ ID NO: 25672 - protein, 80 aa, Synthetic construct
CYSNYPFPLTSWPCSFSPSQNSSEPFYQQLPLEPPAAKTGCPPLWPNPAGNLYEVQSPAYHSPQEDPFLFGWRRATRSFR

SEQ ID NO: 25673 - protein, 80 aa, Synthetic construct
CYSNYPFPLTSWPCSFSPSQNSSEPFYQQLPLEPPAAKTGCPPLWPNPAGNLYEEKSPAYHSPQEDPFLFGWRRATRSFR

SEQ ID NO: 25674 - protein, 80 aa, Synthetic construct
CYSNYPFPLTSWPCSFSPSQNSSEPFYQQLPLEPPAAKTGCPPLWPNPAGNLYEEKVHVDFNSYVQSPLFGWRRATRSFR

SEQ ID NO: 25675 - protein, 80 aa, Synthetic construct
CYSNYPFPLTSWPCSFSPSQNSSEPFYQQLPLEPPAAKTGCPPLWPNPAGNLYEEKVHVDFNSYVQSPAYGWRRATRSFR

SEQ ID NO: 25676 - protein, 80 aa, Synthetic construct
QYCPDPYIQRFVETPAHFSWKESYYRSTMSQSTQTNEFLSPEVFQHIWDFLEQPICSVQPIDLNFVDEPSGWRRATRSFR

SEQ ID NO: 25677 - protein, 80 aa, Synthetic construct
NFCPDPYIQRFVETPAHFSWKESYYRSTMSQSTQTNEFLSPEVFQHIWDFLEQPICSVQPIDLNFVDEPSGWRRATRSFR

SEQ ID NO: 25678 - protein, 80 aa, Synthetic construct
NFETDPYIQRFVETPAHFSWKESYYRSTMSQSTQTNEFLSPEVFQHIWDFLEQPICSVQPIDLNFVDEPSGWRRATRSFR

SEQ ID NO: 25679 - protein, 80 aa, Synthetic construct
NFETSRYIQRFVETPAHFSWKESYYRSTMSQSTQTNEFLSPEVFQHIWDFLEQPICSVQPIDLNFVDEPSGWRRATRSFR

SEQ ID NO: 25680 - protein, 80 aa, Synthetic construct
NFETSRCAQRFVETPAHFSWKESYYRSTMSQSTQTNEFLSPEVFQHIWDFLEQPICSVQPIDLNFVDEPSGWRRATRSFR

SEQ ID NO: 25681 - protein, 80 aa, Synthetic construct
NFETSRCATLFVETPAHFSWKESYYRSTMSQSTQTNEFLSPEVFQHIWDFLEQPICSVQPIDLNFVDEPSGWRRATRSFR

SEQ ID NO: 25682 - protein, 80 aa, Synthetic construct
NFETSRCATLQYETPAHFSWKESYYRSTMSQSTQTNEFLSPEVFQHIWDFLEQPICSVQPIDLNFVDEPSGWRRATRSFR

SEQ ID NO: 25683 - protein, 80 aa, Synthetic construct
NFETSRCATLQYCPPAHFSWKESYYRSTMSQSTQTNEFLSPEVFQHIWDFLEQPICSVQPIDLNFVDEPSGWRRATRSFR

SEQ ID NO: 25684 - protein, 80 aa, Synthetic construct
NFETSRCATLQYCPDPHFSWKESYYRSTMSQSTQTNEFLSPEVFQHIWDFLEQPICSVQPIDLNFVDEPSGWRRATRSFR

SEQ ID NO: 25685 - protein, 80 aa, Synthetic construct
NFETSRCATLQYCPDPYISWKESYYRSTMSQSTQTNEFLSPEVFQHIWDFLEQPICSVQPIDLNFVDEPSGWRRATRSFR

SEQ ID NO: 25686 - protein, 80 aa, Synthetic construct
NFETSRCATLQYCPDPYIQRKESYYRSTMSQSTQTNEFLSPEVFQHIWDFLEQPICSVQPIDLNFVDEPSGWRRATRSFR

SEQ ID NO: 25687 - protein, 80 aa, Synthetic construct
NFETSRCATLQYCPDPYIQRFVETPASTMSQSTQTNEFLSPEVFQHIWDFLEQPICSVQPIDLNFVDEPSGWRRATRSFR

SEQ ID NO: 25688 - protein, 80 aa, Synthetic construct
NFETSRCATLQYCPDPYIQRFVETPAHFMSQSTQTNEFLSPEVFQHIWDFLEQPICSVQPIDLNFVDEPSGWRRATRSFR

SEQ ID NO: 25689 - protein, 80 aa, Synthetic construct
NFETSRCATLQYCPDPYIQRFVETPAHFSWKETQTNEFLSPEVFQHIWDFLEQPICSVQPIDLNFVDEPSGWRRATRSFR

SEQ ID NO: 25690 - protein, 80 aa, Synthetic construct
NFETSRCATLQYCPDPYIQRFVETPAHFSWKESYYRSTMSQSTQTNEFLSPEVFQHIWDFLEQPFVDEPSGWRRATRSFR

SEQ ID NO: 25691 - protein, 80 aa, Synthetic construct
NFETSRCATLQYCPDPYIQRFVETPAHFSWKESYYRSTMSQSTQTNEFLSPEVFQHIWDFLEQPICDEPSGWRRATRSFR

SEQ ID NO: 25692 - protein, 80 aa, Synthetic construct
PEVFQHIWDFLEQPICSVQPIDLNFVDEPSEDGATNKIEISMDCIRMQDSDLSDPMWPQYTNLGLLNSMDGWRRATRSFR

SEQ ID NO: 25693 - protein, 80 aa, Synthetic construct
QSVFQHIWDFLEQPICSVQPIDLNFVDEPSEDGATNKIEISMDCIRMQDSDLSDPMWPQYTNLGLLNSMDGWRRATRSFR

SEQ ID NO: 25694 - protein, 80 aa, Synthetic construct
QSTQQHIWDFLEQPICSVQPIDLNFVDEPSEDGATNKIEISMDCIRMQDSDLSDPMWPQYTNLGLLNSMDGWRRATRSFR

SEQ ID NO: 25695 - protein, 80 aa, Synthetic construct
QSTQTNIWDFLEQPICSVQPIDLNFVDEPSEDGATNKIEISMDCIRMQDSDLSDPMWPQYTNLGLLNSMDGWRRATRSFR

SEQ ID NO: 25696 - protein, 80 aa, Synthetic construct
QSTQTNEFDFLEQPICSVQPIDLNFVDEPSEDGATNKIEISMDCIRMQDSDLSDPMWPQYTNLGLLNSMDGWRRATRSFR

SEQ ID NO: 25697 - protein, 80 aa, Synthetic construct
QSTQTNEFLSPEVFQHIWQPIDLNFVDEPSEDGATNKIEISMDCIRMQDSDLSDPMWPQYTNLGLLNSMDGWRRATRSFR

SEQ ID NO: 25698 - protein, 80 aa, Synthetic construct
QSTQTNEFLSPEVFQHIWDFLEQPFVDEPSEDGATNKIEISMDCIRMQDSDLSDPMWPQYTNLGLLNSMDGWRRATRSFR

SEQ ID NO: 25699 - protein, 80 aa, Synthetic construct
QSTQTNEFLSPEVFQHIWDFLEQPICDEPSEDGATNKIEISMDCIRMQDSDLSDPMWPQYTNLGLLNSMDGWRRATRSFR

SEQ ID NO: 25700 - protein, 80 aa, Synthetic construct
QSTQTNEFLSPEVFQHIWDFLEQPICSVPSEDGATNKIEISMDCIRMQDSDLSDPMWPQYTNLGLLNSMDGWRRATRSFR

SEQ ID NO: 25701 - protein, 80 aa, Synthetic construct
QSTQTNEFLSPEVFQHIWDFLEQPICSVQPEDGATNKIEISMDCIRMQDSDLSDPMWPQYTNLGLLNSMDGWRRATRSFR

SEQ ID NO: 25702 - protein, 80 aa, Synthetic construct
QSTQTNEFLSPEVFQHIWDFLEQPICSVQPIDGATNKIEISMDCIRMQDSDLSDPMWPQYTNLGLLNSMDGWRRATRSFR

SEQ ID NO: 25703 - protein, 80 aa, Synthetic construct
QSTQTNEFLSPEVFQHIWDFLEQPICSVQPIDLNTNKIEISMDCIRMQDSDLSDPMWPQYTNLGLLNSMDGWRRATRSFR

SEQ ID NO: 25704 - protein, 80 aa, Synthetic construct
QSTQTNEFLSPEVFQHIWDFLEQPICSVQPIDLNFVDEPSSMDCIRMQDSDLSDPMWPQYTNLGLLNSMDGWRRATRSFR

SEQ ID NO: 25705 - protein, 80 aa, Synthetic construct
QSTQTNEFLSPEVFQHIWDFLEQPICSVQPIDLNFVDEPSEDGAIRMQDSDLSDPMWPQYTNLGLLNSMDGWRRATRSFR

SEQ ID NO: 25706 - protein, 80 aa, Synthetic construct
QSTQTNEFLSPEVFQHIWDFLEQPICSVQPIDLNFVDEPSEDGATNMQDSDLSDPMWPQYTNLGLLNSMDGWRRATRSFR

SEQ ID NO: 25707 - protein, 80 aa, Synthetic construct
QSTQTNEFLSPEVFQHIWDFLEQPICSVQPIDLNFVDEPSEDGATNKIDSDLSDPMWPQYTNLGLLNSMDGWRRATRSFR

SEQ ID NO: 25708 - protein, 80 aa, Synthetic construct
QSTQTNEFLSPEVFQHIWDFLEQPICSVQPIDLNFVDEPSEDGATNKIEIDLSDPMWPQYTNLGLLNSMDGWRRATRSFR

SEQ ID NO: 25709 - protein, 80 aa, Synthetic construct
QSTQTNEFLSPEVFQHIWDFLEQPICSVQPIDLNFVDEPSEDGATNKIEISMSDPMWPQYTNLGLLNSMDGWRRATRSFR

SEQ ID NO: 25710 - protein, 80 aa, Synthetic construct
QSTQTNEFLSPEVFQHIWDFLEQPICSVQPIDLNFVDEPSEDGATNKIEISMDCPMWPQYTNLGLLNSMDGWRRATRSFR

SEQ ID NO: 25711 - protein, 80 aa, Synthetic construct
QSTQTNEFLSPEVFQHIWDFLEQPICSVQPIDLNFVDEPSEDGATNKIEISMDCIRMQQYTNLGLLNSMDGWRRATRSFR

SEQ ID NO: 25712 - protein, 80 aa, Synthetic construct
QSTQTNEFLSPEVFQHIWDFLEQPICSVQPIDLNFVDEPSEDGATNKIEISMDCIRMQDSTNLGLLNSMDGWRRATRSFR

SEQ ID NO: 25713 - protein, 80 aa, Synthetic construct
QSTQTNEFLSPEVFQHIWDFLEQPICSVQPIDLNFVDEPSEDGATNKIEISMDCIRMQDSDLLGLLNSMDGWRRATRSFR

SEQ ID NO: 25714 - protein, 80 aa, Synthetic construct
QSTQTNEFLSPEVFQHIWDFLEQPICSVQPIDLNFVDEPSEDGATNKIEISMDCIRMQDSDLSDLLNSMDGWRRATRSFR

SEQ ID NO: 25715 - protein, 80 aa, Synthetic construct
QSTQTNEFLSPEVFQHIWDFLEQPICSVQPIDLNFVDEPSEDGATNKIEISMDCIRMQDSDLSDPMNSMDGWRRATRSFR

SEQ ID NO: 25716 - protein, 80 aa, Synthetic construct
QSTQTNEFLSPEVFQHIWDFLEQPICSVQPIDLNFVDEPSEDGATNKIEISMDCIRMQDSDLSDPMWPMDGWRRATRSFR

SEQ ID NO: 25717 - protein, 80 aa, Synthetic construct
QSTQTNEFLSPEVFQHIWDFLEQPICSVQPIDLNFVDEPSEDGATNKIEISMDCIRMQDSDLSDPMWPQYGWRRATRSFR

SEQ ID NO: 25718 - protein, 80 aa, Synthetic construct
ESFHLEYMDLDEFLLENGIPASPTHLAHNLLLPVAELEGKESASSSTASPPSSSTAIFQPSETVSSTESSGWRRATRSFR

SEQ ID NO: 25719 - protein, 80 aa, Synthetic construct
IWDKTIPYDGESFHLEYMDLDEFLLEAHNLLLPVAELEGKESASSSTASPPSSSTAIFQPSETVSSTESSGWRRATRSFR

SEQ ID NO: 25720 - protein, 80 aa, Synthetic construct
IWDKTIPYDGESFHLEYMDLDEFLLENGNLLLPVAELEGKESASSSTASPPSSSTAIFQPSETVSSTESSGWRRATRSFR

SEQ ID NO: 25721 - protein, 80 aa, Synthetic construct
IWDKTIPYDGESFHLEYMDLDEFLLENGIPLLPVAELEGKESASSSTASPPSSSTAIFQPSETVSSTESSGWRRATRSFR

SEQ ID NO: 25722 - protein, 80 aa, Synthetic construct
IWDKTIPYDGESFHLEYMDLDEFLLENGIPASPVAELEGKESASSSTASPPSSSTAIFQPSETVSSTESSGWRRATRSFR

SEQ ID NO: 25723 - protein, 80 aa, Synthetic construct
IWDKTIPYDGESFHLEYMDLDEFLLENGIPASPTAELEGKESASSSTASPPSSSTAIFQPSETVSSTESSGWRRATRSFR

SEQ ID NO: 25724 - protein, 80 aa, Synthetic construct
IWDKTIPYDGESFHLEYMDLDEFLLENGIPASPTHLLEGKESASSSTASPPSSSTAIFQPSETVSSTESSGWRRATRSFR

SEQ ID NO: 25725 - protein, 80 aa, Synthetic construct
IWDKTIPYDGESFHLEYMDLDEFLLENGIPASPTHLAHGKESASSSTASPPSSSTAIFQPSETVSSTESSGWRRATRSFR

SEQ ID NO: 25726 - protein, 80 aa, Synthetic construct
IWDKTIPYDGESFHLEYMDLDEFLLENGIPASPTHLAHNLESASSSTASPPSSSTAIFQPSETVSSTESSGWRRATRSFR

SEQ ID NO: 25727 - protein, 80 aa, Synthetic construct
PSPLPHPAMGRAPVDFINISTDMNTEVDALDPSIMDFALQGNLWEEMKDEGFSLDTLGAFADSPLGCDLGGWRRATRSFR

SEQ ID NO: 25728 - protein, 80 aa, Synthetic construct
PPPLPHPAMGRAPVDFINISTDMNTEVDALDPSIMDFALQGNLWEEMKDEGFSLDTLGAFADSPLGCDLGGWRRATRSFR

SEQ ID NO: 25729 - protein, 80 aa, Synthetic construct
PPLHPHPAMGRAPVDFINISTDMNTEVDALDPSIMDFALQGNLWEEMKDEGFSLDTLGAFADSPLGCDLGGWRRATRSFR

SEQ ID NO: 25730 - protein, 80 aa, Synthetic construct
PPLHALPAMGRAPVDFINISTDMNTEVDALDPSIMDFALQGNLWEEMKDEGFSLDTLGAFADSPLGCDLGGWRRATRSFR

SEQ ID NO: 25731 - protein, 80 aa, Synthetic construct
PPLHALPDMGRAPVDFINISTDMNTEVDALDPSIMDFALQGNLWEEMKDEGFSLDTLGAFADSPLGCDLGGWRRATRSFR

SEQ ID NO: 25732 - protein, 80 aa, Synthetic construct
PPLHALPDLSRAPVDFINISTDMNTEVDALDPSIMDFALQGNLWEEMKDEGFSLDTLGAFADSPLGCDLGGWRRATRSFR

SEQ ID NO: 25733 - protein, 80 aa, Synthetic construct
PPLHALPDLSPSPVDFINISTDMNTEVDALDPSIMDFALQGNLWEEMKDEGFSLDTLGAFADSPLGCDLGGWRRATRSFR

SEQ ID NO: 25734 - protein, 80 aa, Synthetic construct
PPLHALPDLSPSPLDFINISTDMNTEVDALDPSIMDFALQGNLWEEMKDEGFSLDTLGAFADSPLGCDLGGWRRATRSFR

SEQ ID NO: 25735 - protein, 80 aa, Synthetic construct
PPLHALPDLSPSPLPHINISTDMNTEVDALDPSIMDFALQGNLWEEMKDEGFSLDTLGAFADSPLGCDLGGWRRATRSFR

SEQ ID NO: 25736 - protein, 80 aa, Synthetic construct
PPLHALPDLSPSPLPHPAISTDMNTEVDALDPSIMDFALQGNLWEEMKDEGFSLDTLGAFADSPLGCDLGGWRRATRSFR

SEQ ID NO: 25737 - protein, 80 aa, Synthetic construct
PPLHALPDLSPSPLPHPAMGTDMNTEVDALDPSIMDFALQGNLWEEMKDEGFSLDTLGAFADSPLGCDLGGWRRATRSFR

SEQ ID NO: 25738 - protein, 80 aa, Synthetic construct
PPLHALPDLSPSPLPHPAMGRAMNTEVDALDPSIMDFALQGNLWEEMKDEGFSLDTLGAFADSPLGCDLGGWRRATRSFR

SEQ ID NO: 25739 - protein, 80 aa, Synthetic construct
PPLHALPDLSPSPLPHPAMGRAPVTEVDALDPSIMDFALQGNLWEEMKDEGFSLDTLGAFADSPLGCDLGGWRRATRSFR

SEQ ID NO: 25740 - protein, 80 aa, Synthetic construct
PPLHALPDLSPSPLPHPAMGRAPVDFVDALDPSIMDFALQGNLWEEMKDEGFSLDTLGAFADSPLGCDLGGWRRATRSFR

SEQ ID NO: 25741 - protein, 80 aa, Synthetic construct
PPLHALPDLSPSPLPHPAMGRAPVDFINALDPSIMDFALQGNLWEEMKDEGFSLDTLGAFADSPLGCDLGGWRRATRSFR

SEQ ID NO: 25742 - protein, 80 aa, Synthetic construct
PPLHALPDLSPSPLPHPAMGRAPVDFINISTDSIMDFALQGNLWEEMKDEGFSLDTLGAFADSPLGCDLGGWRRATRSFR

SEQ ID NO: 25743 - protein, 80 aa, Synthetic construct
PPLHALPDLSPSPLPHPAMGRAPVDFINISTDMNMDFALQGNLWEEMKDEGFSLDTLGAFADSPLGCDLGGWRRATRSFR

SEQ ID NO: 25744 - protein, 80 aa, Synthetic construct
PPLHALPDLSPSPLPHPAMGRAPVDFINISTDMNTEVDLQGNLWEEMKDEGFSLDTLGAFADSPLGCDLGGWRRATRSFR

SEQ ID NO: 25745 - protein, 80 aa, Synthetic construct
PPLHALPDLSPSPLPHPAMGRAPVDFINISTDMNTEVDALGNLWEEMKDEGFSLDTLGAFADSPLGCDLGGWRRATRSFR

SEQ ID NO: 25746 - protein, 80 aa, Synthetic construct
PPLHALPDLSPSPLPHPAMGRAPVDFINISTDMNTEVDALDPLWEEMKDEGFSLDTLGAFADSPLGCDLGGWRRATRSFR

SEQ ID NO: 25747 - protein, 80 aa, Synthetic construct
PPLHALPDLSPSPLPHPAMGRAPVDFINISTDMNTEVDALDPSIMDFADEGFSLDTLGAFADSPLGCDLGGWRRATRSFR

SEQ ID NO: 25748 - protein, 80 aa, Synthetic construct
PPLHALPDLSPSPLPHPAMGRAPVDFINISTDMNTEVDALDPSIMDFALQGFSLDTLGAFADSPLGCDLGGWRRATRSFR

SEQ ID NO: 25749 - protein, 80 aa, Synthetic construct
PPLHALPDLSPSPLPHPAMGRAPVDFINISTDMNTEVDALDPSIMDFALQGNLWDTLGAFADSPLGCDLGGWRRATRSFR

SEQ ID NO: 25750 - protein, 80 aa, Synthetic construct
PPLHALPDLSPSPLPHPAMGRAPVDFINISTDMNTEVDALDPSIMDFALQGNLWEELGAFADSPLGCDLGGWRRATRSFR

SEQ ID NO: 25751 - protein, 80 aa, Synthetic construct
PPLHALPDLSPSPLPHPAMGRAPVDFINISTDMNTEVDALDPSIMDFALQGNLWEEMKAFADSPLGCDLGGWRRATRSFR

SEQ ID NO: 25752 - protein, 80 aa, Synthetic construct
PPLHALPDLSPSPLPHPAMGRAPVDFINISTDMNTEVDALDPSIMDFALQGNLWEEMKDEGFSPLGCDLGGWRRATRSFR

SEQ ID NO: 25753 - protein, 80 aa, Synthetic construct
PPLHALPDLSPSPLPHPAMGRAPVDFINISTDMNTEVDALDPSIMDFALQGNLWEEMKDEGFSLDTCDLGGWRRATRSFR

SEQ ID NO: 25754 - protein, 80 aa, Synthetic construct
PPLHALPDLSPSPLPHPAMGRAPVDFINISTDMNTEVDALDPSIMDFALQGNLWEEMKDEGFSLDTLGLGGWRRATRSFR

SEQ ID NO: 25755 - protein, 80 aa, Synthetic construct
PPLHALPDLSPSPLPHPAMGRAPVDFINISTDMNTEVDALDPSIMDFALQGNLWEEMKDEGFSLDTLGAFGWRRATRSFR

SEQ ID NO: 25756 - protein, 80 aa, Synthetic construct
RAPVDFINISTDMNTEVDALDPSIMDFALQGNLWEEMKDEGFSLDTLGAFADSPLGCDLGASGLTPASGGGWRRATRSFR

SEQ ID NO: 25757 - protein, 80 aa, Synthetic construct
PSPVDFINISTDMNTEVDALDPSIMDFALQGNLWEEMKDEGFSLDTLGAFADSPLGCDLGASGLTPASGGGWRRATRSFR

SEQ ID NO: 25758 - protein, 80 aa, Synthetic construct
PSPLDFINISTDMNTEVDALDPSIMDFALQGNLWEEMKDEGFSLDTLGAFADSPLGCDLGASGLTPASGGGWRRATRSFR

SEQ ID NO: 25759 - protein, 80 aa, Synthetic construct
PSPLPHINISTDMNTEVDALDPSIMDFALQGNLWEEMKDEGFSLDTLGAFADSPLGCDLGASGLTPASGGGWRRATRSFR

SEQ ID NO: 25760 - protein, 80 aa, Synthetic construct
PSPLPHPAISTDMNTEVDALDPSIMDFALQGNLWEEMKDEGFSLDTLGAFADSPLGCDLGASGLTPASGGGWRRATRSFR

SEQ ID NO: 25761 - protein, 80 aa, Synthetic construct
PSPLPHPAMGTDMNTEVDALDPSIMDFALQGNLWEEMKDEGFSLDTLGAFADSPLGCDLGASGLTPASGGGWRRATRSFR

SEQ ID NO: 25762 - protein, 80 aa, Synthetic construct
PSPLPHPAMGRAMNTEVDALDPSIMDFALQGNLWEEMKDEGFSLDTLGAFADSPLGCDLGASGLTPASGGGWRRATRSFR

SEQ ID NO: 25763 - protein, 80 aa, Synthetic construct
PSPLPHPAMGRAPVTEVDALDPSIMDFALQGNLWEEMKDEGFSLDTLGAFADSPLGCDLGASGLTPASGGGWRRATRSFR

SEQ ID NO: 25764 - protein, 80 aa, Synthetic construct
PSPLPHPAMGRAPVDFVDALDPSIMDFALQGNLWEEMKDEGFSLDTLGAFADSPLGCDLGASGLTPASGGGWRRATRSFR

SEQ ID NO: 25765 - protein, 80 aa, Synthetic construct
PSPLPHPAMGRAPVDFINISTDSIMDFALQGNLWEEMKDEGFSLDTLGAFADSPLGCDLGASGLTPASGGGWRRATRSFR

SEQ ID NO: 25766 - protein, 80 aa, Synthetic construct
PSPLPHPAMGRAPVDFINISTDMNTEVDALDPSIMDFALQGFSLDTLGAFADSPLGCDLGASGLTPASGGGWRRATRSFR

SEQ ID NO: 25767 - protein, 80 aa, Synthetic construct
PSPLPHPAMGRAPVDFINISTDMNTEVDALDPSIMDFALQGNLWDTLGAFADSPLGCDLGASGLTPASGGGWRRATRSFR

SEQ ID NO: 25768 - protein, 80 aa, Synthetic construct
PSPLPHPAMGRAPVDFINISTDMNTEVDALDPSIMDFALQGNLWEELGAFADSPLGCDLGASGLTPASGGGWRRATRSFR

SEQ ID NO: 25769 - protein, 80 aa, Synthetic construct
PSPLPHPAMGRAPVDFINISTDMNTEVDALDPSIMDFALQGNLWEEMKAFADSPLGCDLGASGLTPASGGGWRRATRSFR

SEQ ID NO: 25770 - protein, 80 aa, Synthetic construct
PSPLPHPAMGRAPVDFINISTDMNTEVDALDPSIMDFALQGNLWEEMKDEGFSLDTLGLGASGLTPASGGGWRRATRSFR

SEQ ID NO: 25771 - protein, 80 aa, Synthetic construct
PSPLPHPAMGRAPVDFINISTDMNTEVDALDPSIMDFALQGNLWEEMKDEGFSLDTLGAFASGLTPASGGGWRRATRSFR

SEQ ID NO: 25772 - protein, 80 aa, Synthetic construct
PSPLPHPAMGRAPVDFINISTDMNTEVDALDPSIMDFALQGNLWEEMKDEGFSLDTLGAFADGLTPASGGGWRRATRSFR

SEQ ID NO: 25773 - protein, 80 aa, Synthetic construct
PSPLPHPAMGRAPVDFINISTDMNTEVDALDPSIMDFALQGNLWEEMKDEGFSLDTLGAFADSPTPASGGGWRRATRSFR

SEQ ID NO: 25774 - protein, 80 aa, Synthetic construct
PSPLPHPAMGRAPVDFINISTDMNTEVDALDPSIMDFALQGNLWEEMKDEGFSLDTLGAFADSPLGASGGGWRRATRSFR

SEQ ID NO: 25775 - protein, 80 aa, Synthetic construct
PSPLPHPAMGRAPVDFINISTDMNTEVDALDPSIMDFALQGNLWEEMKDEGFSLDTLGAFADSPLGCDGGGWRRATRSFR

SEQ ID NO: 25776 - protein, 80 aa, Synthetic construct
TDMNTEVDALDPSIMDFALQGNLWEEMKDEGFSLDTLGAFADSPLGCDLGASGLTPASGGSDQSFPDLQVGWRRATRSFR

SEQ ID NO: 25777 - protein, 80 aa, Synthetic construct
RAMNTEVDALDPSIMDFALQGNLWEEMKDEGFSLDTLGAFADSPLGCDLGASGLTPASGGSDQSFPDLQVGWRRATRSFR

SEQ ID NO: 25778 - protein, 80 aa, Synthetic construct
RAPVTEVDALDPSIMDFALQGNLWEEMKDEGFSLDTLGAFADSPLGCDLGASGLTPASGGSDQSFPDLQVGWRRATRSFR

SEQ ID NO: 25779 - protein, 80 aa, Synthetic construct
RAPVDFVDALDPSIMDFALQGNLWEEMKDEGFSLDTLGAFADSPLGCDLGASGLTPASGGSDQSFPDLQVGWRRATRSFR

SEQ ID NO: 25780 - protein, 80 aa, Synthetic construct
RAPVDFINISTDSIMDFALQGNLWEEMKDEGFSLDTLGAFADSPLGCDLGASGLTPASGGSDQSFPDLQVGWRRATRSFR

SEQ ID NO: 25781 - protein, 80 aa, Synthetic construct
RAPVDFINISTDMNMDFALQGNLWEEMKDEGFSLDTLGAFADSPLGCDLGASGLTPASGGSDQSFPDLQVGWRRATRSFR

SEQ ID NO: 25782 - protein, 80 aa, Synthetic construct
RAPVDFINISTDMNTEVDALGNLWEEMKDEGFSLDTLGAFADSPLGCDLGASGLTPASGGSDQSFPDLQVGWRRATRSFR

SEQ ID NO: 25783 - protein, 80 aa, Synthetic construct
RAPVDFINISTDMNTEVDALDPSIMDFADEGFSLDTLGAFADSPLGCDLGASGLTPASGGSDQSFPDLQVGWRRATRSFR

SEQ ID NO: 25784 - protein, 80 aa, Synthetic construct
RAPVDFINISTDMNTEVDALDPSIMDFALQGFSLDTLGAFADSPLGCDLGASGLTPASGGSDQSFPDLQVGWRRATRSFR

SEQ ID NO: 25785 - protein, 80 aa, Synthetic construct
RAPVDFINISTDMNTEVDALDPSIMDFALQGNLWDTLGAFADSPLGCDLGASGLTPASGGSDQSFPDLQVGWRRATRSFR

SEQ ID NO: 25786 - protein, 80 aa, Synthetic construct
RAPVDFINISTDMNTEVDALDPSIMDFALQGNLWEELGAFADSPLGCDLGASGLTPASGGSDQSFPDLQVGWRRATRSFR

SEQ ID NO: 25787 - protein, 80 aa, Synthetic construct
RAPVDFINISTDMNTEVDALDPSIMDFALQGNLWEEMKAFADSPLGCDLGASGLTPASGGSDQSFPDLQVGWRRATRSFR

SEQ ID NO: 25788 - protein, 80 aa, Synthetic construct
RAPVDFINISTDMNTEVDALDPSIMDFALQGNLWEEMKDEGFSLLGCDLGASGLTPASGGSDQSFPDLQVGWRRATRSFR

SEQ ID NO: 25789 - protein, 80 aa, Synthetic construct
RAPVDFINISTDMNTEVDALDPSIMDFALQGNLWEEMKDEGFSLDTCDLGASGLTPASGGSDQSFPDLQVGWRRATRSFR

SEQ ID NO: 25790 - protein, 80 aa, Synthetic construct
RAPVDFINISTDMNTEVDALDPSIMDFALQGNLWEEMKDEGFSLDTLGLGASGLTPASGGSDQSFPDLQVGWRRATRSFR

SEQ ID NO: 25791 - protein, 80 aa, Synthetic construct
RAPVDFINISTDMNTEVDALDPSIMDFALQGNLWEEMKDEGFSLDTLGAFASGLTPASGGSDQSFPDLQVGWRRATRSFR

SEQ ID NO: 25792 - protein, 80 aa, Synthetic construct
RAPVDFINISTDMNTEVDALDPSIMDFALQGNLWEEMKDEGFSLDTLGAFADGLTPASGGSDQSFPDLQVGWRRATRSFR

SEQ ID NO: 25793 - protein, 80 aa, Synthetic construct
RAPVDFINISTDMNTEVDALDPSIMDFALQGNLWEEMKDEGFSLDTLGAFADSPTPASGGSDQSFPDLQVGWRRATRSFR

SEQ ID NO: 25794 - protein, 80 aa, Synthetic construct
RAPVDFINISTDMNTEVDALDPSIMDFALQGNLWEEMKDEGFSLDTLGAFADSPLGASGGSDQSFPDLQVGWRRATRSFR

SEQ ID NO: 25795 - protein, 80 aa, Synthetic construct
RAPVDFINISTDMNTEVDALDPSIMDFALQGNLWEEMKDEGFSLDTLGAFADSPLGCDGGSDQSFPDLQVGWRRATRSFR

SEQ ID NO: 25796 - protein, 80 aa, Synthetic construct
RAPVDFINISTDMNTEVDALDPSIMDFALQGNLWEEMKDEGFSLDTLGAFADSPLGCDLGSDQSFPDLQVGWRRATRSFR

SEQ ID NO: 25797 - protein, 80 aa, Synthetic construct
RAPVDFINISTDMNTEVDALDPSIMDFALQGNLWEEMKDEGFSLDTLGAFADSPLGCDLGASQSFPDLQVGWRRATRSFR

SEQ ID NO: 25798 - protein, 80 aa, Synthetic construct
RAPVDFINISTDMNTEVDALDPSIMDFALQGNLWEEMKDEGFSLDTLGAFADSPLGCDLGASGLTPDLQVGWRRATRSFR

SEQ ID NO: 25799 - protein, 80 aa, Synthetic construct
RAPVDFINISTDMNTEVDALDPSIMDFALQGNLWEEMKDEGFSLDTLGAFADSPLGCDLGASGLTPASQVGWRRATRSFR

SEQ ID NO: 25800 - protein, 80 aa, Synthetic construct
DPSIMDFALQGNLWEEMKDEGFSLDTLGAFADSPLGCDLGASGLTPASGGSDQSFPDLQVTGLYTAYSTPGWRRATRSFR

SEQ ID NO: 25801 - protein, 80 aa, Synthetic construct
TDSIMDFALQGNLWEEMKDEGFSLDTLGAFADSPLGCDLGASGLTPASGGSDQSFPDLQVTGLYTAYSTPGWRRATRSFR

SEQ ID NO: 25802 - protein, 80 aa, Synthetic construct
TDMNMDFALQGNLWEEMKDEGFSLDTLGAFADSPLGCDLGASGLTPASGGSDQSFPDLQVTGLYTAYSTPGWRRATRSFR

SEQ ID NO: 25803 - protein, 80 aa, Synthetic construct
TDMNTEVDALGNLWEEMKDEGFSLDTLGAFADSPLGCDLGASGLTPASGGSDQSFPDLQVTGLYTAYSTPGWRRATRSFR

SEQ ID NO: 25804 - protein, 80 aa, Synthetic construct
TDMNTEVDALDPSIMDFADEGFSLDTLGAFADSPLGCDLGASGLTPASGGSDQSFPDLQVTGLYTAYSTPGWRRATRSFR

SEQ ID NO: 25805 - protein, 80 aa, Synthetic construct
TDMNTEVDALDPSIMDFALQGFSLDTLGAFADSPLGCDLGASGLTPASGGSDQSFPDLQVTGLYTAYSTPGWRRATRSFR

SEQ ID NO: 25806 - protein, 80 aa, Synthetic construct
TDMNTEVDALDPSIMDFALQGNLWDTLGAFADSPLGCDLGASGLTPASGGSDQSFPDLQVTGLYTAYSTPGWRRATRSFR

SEQ ID NO: 25807 - protein, 80 aa, Synthetic construct
TDMNTEVDALDPSIMDFALQGNLWEELGAFADSPLGCDLGASGLTPASGGSDQSFPDLQVTGLYTAYSTPGWRRATRSFR

SEQ ID NO: 25808 - protein, 80 aa, Synthetic construct
TDMNTEVDALDPSIMDFALQGNLWEEMKAFADSPLGCDLGASGLTPASGGSDQSFPDLQVTGLYTAYSTPGWRRATRSFR

SEQ ID NO: 25809 - protein, 80 aa, Synthetic construct
TDMNTEVDALDPSIMDFALQGNLWEEMKDEGFSPLGCDLGASGLTPASGGSDQSFPDLQVTGLYTAYSTPGWRRATRSFR

SEQ ID NO: 25810 - protein, 80 aa, Synthetic construct
TDMNTEVDALDPSIMDFALQGNLWEEMKDEGFSLLGCDLGASGLTPASGGSDQSFPDLQVTGLYTAYSTPGWRRATRSFR

SEQ ID NO: 25811 - protein, 80 aa, Synthetic construct
TDMNTEVDALDPSIMDFALQGNLWEEMKDEGFSLDTCDLGASGLTPASGGSDQSFPDLQVTGLYTAYSTPGWRRATRSFR

SEQ ID NO: 25812 - protein, 80 aa, Synthetic construct
TDMNTEVDALDPSIMDFALQGNLWEEMKDEGFSLDTLGLGASGLTPASGGSDQSFPDLQVTGLYTAYSTPGWRRATRSFR

SEQ ID NO: 25813 - protein, 80 aa, Synthetic construct
TDMNTEVDALDPSIMDFALQGNLWEEMKDEGFSLDTLGAFASGLTPASGGSDQSFPDLQVTGLYTAYSTPGWRRATRSFR

SEQ ID NO: 25814 - protein, 80 aa, Synthetic construct
TDMNTEVDALDPSIMDFALQGNLWEEMKDEGFSLDTLGAFADGLTPASGGSDQSFPDLQVTGLYTAYSTPGWRRATRSFR

SEQ ID NO: 25815 - protein, 80 aa, Synthetic construct
TDMNTEVDALDPSIMDFALQGNLWEEMKDEGFSLDTLGAFADSPTPASGGSDQSFPDLQVTGLYTAYSTPGWRRATRSFR

SEQ ID NO: 25816 - protein, 80 aa, Synthetic construct
TDMNTEVDALDPSIMDFALQGNLWEEMKDEGFSLDTLGAFADSPLGASGGSDQSFPDLQVTGLYTAYSTPGWRRATRSFR

SEQ ID NO: 25817 - protein, 80 aa, Synthetic construct
TDMNTEVDALDPSIMDFALQGNLWEEMKDEGFSLDTLGAFADSPLGCDGGSDQSFPDLQVTGLYTAYSTPGWRRATRSFR

SEQ ID NO: 25818 - protein, 80 aa, Synthetic construct
TDMNTEVDALDPSIMDFALQGNLWEEMKDEGFSLDTLGAFADSPLGCDLGSDQSFPDLQVTGLYTAYSTPGWRRATRSFR

SEQ ID NO: 25819 - protein, 80 aa, Synthetic construct
TDMNTEVDALDPSIMDFALQGNLWEEMKDEGFSLDTLGAFADSPLGCDLGASQSFPDLQVTGLYTAYSTPGWRRATRSFR

SEQ ID NO: 25820 - protein, 80 aa, Synthetic construct
TDMNTEVDALDPSIMDFALQGNLWEEMKDEGFSLDTLGAFADSPLGCDLGASGLTPDLQVTGLYTAYSTPGWRRATRSFR

SEQ ID NO: 25821 - protein, 80 aa, Synthetic construct
TDMNTEVDALDPSIMDFALQGNLWEEMKDEGFSLDTLGAFADSPLGCDLGASGLTPASQVTGLYTAYSTPGWRRATRSFR

SEQ ID NO: 25822 - protein, 80 aa, Synthetic construct
TDMNTEVDALDPSIMDFALQGNLWEEMKDEGFSLDTLGAFADSPLGCDLGASGLTPASGGTGLYTAYSTPGWRRATRSFR

SEQ ID NO: 25823 - protein, 80 aa, Synthetic construct
TDMNTEVDALDPSIMDFALQGNLWEEMKDEGFSLDTLGAFADSPLGCDLGASGLTPASGGSDLYTAYSTPGWRRATRSFR

SEQ ID NO: 25824 - protein, 80 aa, Synthetic construct
TDMNTEVDALDPSIMDFALQGNLWEEMKDEGFSLDTLGAFADSPLGCDLGASGLTPASGGSDQSTAYSTPGWRRATRSFR

SEQ ID NO: 25825 - protein, 80 aa, Synthetic construct
TDMNTEVDALDPSIMDFALQGNLWEEMKDEGFSLDTLGAFADSPLGCDLGASGLTPASGGSDQSFPYSTPGWRRATRSFR

SEQ ID NO: 25826 - protein, 80 aa, Synthetic construct
TDMNTEVDALDPSIMDFALQGNLWEEMKDEGFSLDTLGAFADSPLGCDLGASGLTPASGGSDQSFPDLTPGWRRATRSFR

SEQ ID NO: 25827 - protein, 80 aa, Synthetic construct
GQEPPEMNLYYENFFHPQGVPSPQRPSFEGGGEYGATPNPYLWFNGPTMTPPPYLPGPNASPFLPQAYGVGWRRATRSFR

SEQ ID NO: 25828 - protein, 80 aa, Synthetic construct
PREPPEMNLYYENFFHPQGVPSPQRPSFEGGGEYGATPNPYLWFNGPTMTPPPYLPGPNASPFLPQAYGVGWRRATRSFR

SEQ ID NO: 25829 - protein, 80 aa, Synthetic construct
PRCSPEMNLYYENFFHPQGVPSPQRPSFEGGGEYGATPNPYLWFNGPTMTPPPYLPGPNASPFLPQAYGVGWRRATRSFR

SEQ ID NO: 25830 - protein, 80 aa, Synthetic construct
PRCSPQMNLYYENFFHPQGVPSPQRPSFEGGGEYGATPNPYLWFNGPTMTPPPYLPGPNASPFLPQAYGVGWRRATRSFR

SEQ ID NO: 25831 - protein, 80 aa, Synthetic construct
PRCSPQFPSIYENFFHPQGVPSPQRPSFEGGGEYGATPNPYLWFNGPTMTPPPYLPGPNASPFLPQAYGVGWRRATRSFR

SEQ ID NO: 25832 - protein, 80 aa, Synthetic construct
PRCSPQFPSIGQNFFHPQGVPSPQRPSFEGGGEYGATPNPYLWFNGPTMTPPPYLPGPNASPFLPQAYGVGWRRATRSFR

SEQ ID NO: 25833 - protein, 80 aa, Synthetic construct
PRCSPQFPSIGQEPPEMNLYYEPQRPSFEGGGEYGATPNPYLWFNGPTMTPPPYLPGPNASPFLPQAYGVGWRRATRSFR

SEQ ID NO: 25834 - protein, 80 aa, Synthetic construct
PRCSPQFPSIGQEPPEMNLYYENFRPSFEGGGEYGATPNPYLWFNGPTMTPPPYLPGPNASPFLPQAYGVGWRRATRSFR

SEQ ID NO: 25835 - protein, 80 aa, Synthetic construct
PRCSPQFPSIGQEPPEMNLYYENFFHPQEGGGEYGATPNPYLWFNGPTMTPPPYLPGPNASPFLPQAYGVGWRRATRSFR

SEQ ID NO: 25836 - protein, 80 aa, Synthetic construct
PRCSPQFPSIGQEPPEMNLYYENFFHPQGVPSPQGATPNPYLWFNGPTMTPPPYLPGPNASPFLPQAYGVGWRRATRSFR

SEQ ID NO: 25837 - protein, 80 aa, Synthetic construct
PRCSPQFPSIGQEPPEMNLYYENFFHPQGVPSPQRPTPNPYLWFNGPTMTPPPYLPGPNASPFLPQAYGVGWRRATRSFR

SEQ ID NO: 25838 - protein, 80 aa, Synthetic construct
PRCSPQFPSIGQEPPEMNLYYENFFHPQGVPSPQRPSFEGGGWFNGPTMTPPPYLPGPNASPFLPQAYGVGWRRATRSFR

SEQ ID NO: 25839 - protein, 80 aa, Synthetic construct
PRCSPQFPSIGQEPPEMNLYYENFFHPQGVPSPQRPSFEGGGEYGATPNPYLPYLPGPNASPFLPQAYGVGWRRATRSFR

SEQ ID NO: 25840 - protein, 80 aa, Synthetic construct
PRCSPQFPSIGQEPPEMNLYYENFFHPQGVPSPQRPSFEGGGEYGATPNPYLWFNGGPNASPFLPQAYGVGWRRATRSFR

SEQ ID NO: 25841 - protein, 80 aa, Synthetic construct
PRCSPQFPSIGQEPPEMNLYYENFFHPQGVPSPQRPSFEGGGEYGATPNPYLWFNGPTNASPFLPQAYGVGWRRATRSFR

SEQ ID NO: 25842 - protein, 80 aa, Synthetic construct
PRCSPQFPSIGQEPPEMNLYYENFFHPQGVPSPQRPSFEGGGEYGATPNPYLWFNGPTMTSPFLPQAYGVGWRRATRSFR

SEQ ID NO: 25843 - protein, 80 aa, Synthetic construct
PRCSPQFPSIGQEPPEMNLYYENFFHPQGVPSPQRPSFEGGGEYGATPNPYLWFNGPTMTPPFLPQAYGVGWRRATRSFR

SEQ ID NO: 25844 - protein, 80 aa, Synthetic construct
PRCSPQFPSIGQEPPEMNLYYENFFHPQGVPSPQRPSFEGGGEYGATPNPYLWFNGPTMTPPPYPQAYGVGWRRATRSFR

SEQ ID NO: 25845 - protein, 80 aa, Synthetic construct
PRCSPQFPSIGQEPPEMNLYYENFFHPQGVPSPQRPSFEGGGEYGATPNPYLWFNGPTMTPPPYLPAYGVGWRRATRSFR

SEQ ID NO: 25846 - protein, 80 aa, Synthetic construct
PRCSPQFPSIGQEPPEMNLYYENFFHPQGVPSPQRPSFEGGGEYGATPNPYLWFNGPTMTPPPYLPGPGVGWRRATRSFR

SEQ ID NO: 25847 - protein, 80 aa, Synthetic construct
PRCSPQFPSIGQEPPEMNLYYENFFHPQGVPSPQRPSFEGGGEYGATPNPYLWFNGPTMTPPPYLPGPNAGWRRATRSFR

SEQ ID NO: 25848 - protein, 80 aa, Synthetic construct
SAHSASEQQLGGGAAAGNLSLSLVDKDLDSFSEGSLGSHFEFPDYCTPELSEMIAGDWLEANFSDLVFTYGWRRATRSFR

SEQ ID NO: 25849 - protein, 80 aa, Synthetic construct
MFHSASEQQLGGGAAAGNLSLSLVDKDLDSFSEGSLGSHFEFPDYCTPELSEMIAGDWLEANFSDLVFTYGWRRATRSFR

SEQ ID NO: 25850 - protein, 80 aa, Synthetic construct
MFDLASEQQLGGGAAAGNLSLSLVDKDLDSFSEGSLGSHFEFPDYCTPELSEMIAGDWLEANFSDLVFTYGWRRATRSFR

SEQ ID NO: 25851 - protein, 80 aa, Synthetic construct
MFDLSLEQQLGGGAAAGNLSLSLVDKDLDSFSEGSLGSHFEFPDYCTPELSEMIAGDWLEANFSDLVFTYGWRRATRSFR

SEQ ID NO: 25852 - protein, 80 aa, Synthetic construct
MFDLSLNFQLGGGAAAGNLSLSLVDKDLDSFSEGSLGSHFEFPDYCTPELSEMIAGDWLEANFSDLVFTYGWRRATRSFR

SEQ ID NO: 25853 - protein, 80 aa, Synthetic construct
MFDLSLNFSQGGGAAAGNLSLSLVDKDLDSFSEGSLGSHFEFPDYCTPELSEMIAGDWLEANFSDLVFTYGWRRATRSFR

SEQ ID NO: 25854 - protein, 80 aa, Synthetic construct
MFDLSLNFSQSAGAAAGNLSLSLVDKDLDSFSEGSLGSHFEFPDYCTPELSEMIAGDWLEANFSDLVFTYGWRRATRSFR

SEQ ID NO: 25855 - protein, 80 aa, Synthetic construct
MFDLSLNFSQSAHSAAGNLSLSLVDKDLDSFSEGSLGSHFEFPDYCTPELSEMIAGDWLEANFSDLVFTYGWRRATRSFR

SEQ ID NO: 25856 - protein, 80 aa, Synthetic construct
MFDLSLNFSQSAHSASGNLSLSLVDKDLDSFSEGSLGSHFEFPDYCTPELSEMIAGDWLEANFSDLVFTYGWRRATRSFR

SEQ ID NO: 25857 - protein, 80 aa, Synthetic construct
MFDLSLNFSQSAHSASEQLSLSLVDKDLDSFSEGSLGSHFEFPDYCTPELSEMIAGDWLEANFSDLVFTYGWRRATRSFR

SEQ ID NO: 25858 - protein, 80 aa, Synthetic construct
MFDLSLNFSQSAHSASEQQLLSLVDKDLDSFSEGSLGSHFEFPDYCTPELSEMIAGDWLEANFSDLVFTYGWRRATRSFR

SEQ ID NO: 25859 - protein, 80 aa, Synthetic construct
MFDLSLNFSQSAHSASEQQLGGLVDKDLDSFSEGSLGSHFEFPDYCTPELSEMIAGDWLEANFSDLVFTYGWRRATRSFR

SEQ ID NO: 25860 - protein, 80 aa, Synthetic construct
MFDLSLNFSQSAHSASEQQLGGGADKDLDSFSEGSLGSHFEFPDYCTPELSEMIAGDWLEANFSDLVFTYGWRRATRSFR

SEQ ID NO: 25861 - protein, 80 aa, Synthetic construct
MFDLSLNFSQSAHSASEQQLGGGAAADLDSFSEGSLGSHFEFPDYCTPELSEMIAGDWLEANFSDLVFTYGWRRATRSFR

SEQ ID NO: 25862 - protein, 80 aa, Synthetic construct
MFDLSLNFSQSAHSASEQQLGGGAAAGNDSFSEGSLGSHFEFPDYCTPELSEMIAGDWLEANFSDLVFTYGWRRATRSFR

SEQ ID NO: 25863 - protein, 80 aa, Synthetic construct
MFDLSLNFSQSAHSASEQQLGGGAAAGNLSFSEGSLGSHFEFPDYCTPELSEMIAGDWLEANFSDLVFTYGWRRATRSFR

SEQ ID NO: 25864 - protein, 80 aa, Synthetic construct
MFDLSLNFSQSAHSASEQQLGGGAAAGNLSLSEGSLGSHFEFPDYCTPELSEMIAGDWLEANFSDLVFTYGWRRATRSFR

SEQ ID NO: 25865 - protein, 80 aa, Synthetic construct
MFDLSLNFSQSAHSASEQQLGGGAAAGNLSLSLVDKGSHFEFPDYCTPELSEMIAGDWLEANFSDLVFTYGWRRATRSFR

SEQ ID NO: 25866 - protein, 80 aa, Synthetic construct
MFDLSLNFSQSAHSASEQQLGGGAAAGNLSLSLVDKDLDSFSEGSLGSHFEFPDAGDWLEANFSDLVFTYGWRRATRSFR

SEQ ID NO: 25867 - protein, 80 aa, Synthetic construct
MFDLSLNFSQSAHSASEQQLGGGAAAGNLSLSLVDKDLDSFSEGSLGSHFEFPDYCDWLEANFSDLVFTYGWRRATRSFR

SEQ ID NO: 25868 - protein, 80 aa, Synthetic construct
MFDLSLNFSQSAHSASEQQLGGGAAAGNLSLSLVDKDLDSFSEGSLGSHFEFPDYCTPLEANFSDLVFTYGWRRATRSFR

SEQ ID NO: 25869 - protein, 80 aa, Synthetic construct
MFDLSLNFSQSAHSASEQQLGGGAAAGNLSLSLVDKDLDSFSEGSLGSHFEFPDYCTPELANFSDLVFTYGWRRATRSFR

SEQ ID NO: 25870 - protein, 80 aa, Synthetic construct
MFDLSLNFSQSAHSASEQQLGGGAAAGNLSLSLVDKDLDSFSEGSLGSHFEFPDYCTPELSEFSDLVFTYGWRRATRSFR

SEQ ID NO: 25871 - protein, 80 aa, Synthetic construct
MFDLSLNFSQSAHSASEQQLGGGAAAGNLSLSLVDKDLDSFSEGSLGSHFEFPDYCTPELSEMIDLVFTYGWRRATRSFR

SEQ ID NO: 25872 - protein, 80 aa, Synthetic construct
MFDLSLNFSQSAHSASEQQLGGGAAAGNLSLSLVDKDLDSFSEGSLGSHFEFPDYCTPELSEMIAGVFTYGWRRATRSFR

SEQ ID NO: 25873 - protein, 80 aa, Synthetic construct
MFDLSLNFSQSAHSASEQQLGGGAAAGNLSLSLVDKDLDSFSEGSLGSHFEFPDYCTPELSEMIAGDWTYGWRRATRSFR

SEQ ID NO: 25874 - protein, 80 aa, Synthetic construct
MFDLSLNFSQSAHSASEQQLGGGAAAGNLSLSLVDKDLDSFSEGSLGSHFEFPDYCTPELSEMIAGDWLEGWRRATRSFR

SEQ ID NO: 25875 - protein, 80 aa, Synthetic construct
LYSTSANLPVMGHEKFPSDLDLDMFNGSLECDMESIIRSELMDADGLDFNFDSLISTQNVVGLNVGNFTGGWRRATRSFR

SEQ ID NO: 25876 - protein, 80 aa, Synthetic construct
TLSTSANLPVMGHEKFPSDLDLDMFNGSLECDMESIIRSELMDADGLDFNFDSLISTQNVVGLNVGNFTGGWRRATRSFR

SEQ ID NO: 25877 - protein, 80 aa, Synthetic construct
TLSDSANLPVMGHEKFPSDLDLDMFNGSLECDMESIIRSELMDADGLDFNFDSLISTQNVVGLNVGNFTGGWRRATRSFR

SEQ ID NO: 25878 - protein, 80 aa, Synthetic construct
TLSDSLNLPVMGHEKFPSDLDLDMFNGSLECDMESIIRSELMDADGLDFNFDSLISTQNVVGLNVGNFTGGWRRATRSFR

SEQ ID NO: 25879 - protein, 80 aa, Synthetic construct
TLSDSLSGPVMGHEKFPSDLDLDMFNGSLECDMESIIRSELMDADGLDFNFDSLISTQNVVGLNVGNFTGGWRRATRSFR

SEQ ID NO: 25880 - protein, 80 aa, Synthetic construct
TLSDSLSGSSMGHEKFPSDLDLDMFNGSLECDMESIIRSELMDADGLDFNFDSLISTQNVVGLNVGNFTGGWRRATRSFR

SEQ ID NO: 25881 - protein, 80 aa, Synthetic construct
TLSDSLSGSSLYHEKFPSDLDLDMFNGSLECDMESIIRSELMDADGLDFNFDSLISTQNVVGLNVGNFTGGWRRATRSFR

SEQ ID NO: 25882 - protein, 80 aa, Synthetic construct
TLSDSLSGSSLYSTKFPSDLDLDMFNGSLECDMESIIRSELMDADGLDFNFDSLISTQNVVGLNVGNFTGGWRRATRSFR

SEQ ID NO: 25883 - protein, 80 aa, Synthetic construct
TLSDSLSGSSLYSTSAPSDLDLDMFNGSLECDMESIIRSELMDADGLDFNFDSLISTQNVVGLNVGNFTGGWRRATRSFR

SEQ ID NO: 25884 - protein, 80 aa, Synthetic construct
TLSDSLSGSSLYSTSANLDLDLDMFNGSLECDMESIIRSELMDADGLDFNFDSLISTQNVVGLNVGNFTGGWRRATRSFR

SEQ ID NO: 25885 - protein, 80 aa, Synthetic construct
TLSDSLSGSSLYSTSANLPVDLDMFNGSLECDMESIIRSELMDADGLDFNFDSLISTQNVVGLNVGNFTGGWRRATRSFR

SEQ ID NO: 25886 - protein, 80 aa, Synthetic construct
TLSDSLSGSSLYSTSANLPVMGDMFNGSLECDMESIIRSELMDADGLDFNFDSLISTQNVVGLNVGNFTGGWRRATRSFR

SEQ ID NO: 25887 - protein, 80 aa, Synthetic construct
TLSDSLSGSSLYSTSANLPVMGHEFNGSLECDMESIIRSELMDADGLDFNFDSLISTQNVVGLNVGNFTGGWRRATRSFR

SEQ ID NO: 25888 - protein, 80 aa, Synthetic construct
TLSDSLSGSSLYSTSANLPVMGHEKFGSLECDMESIIRSELMDADGLDFNFDSLISTQNVVGLNVGNFTGGWRRATRSFR

SEQ ID NO: 25889 - protein, 80 aa, Synthetic construct
TLSDSLSGSSLYSTSANLPVMGHEKFPSLECDMESIIRSELMDADGLDFNFDSLISTQNVVGLNVGNFTGGWRRATRSFR

SEQ ID NO: 25890 - protein, 80 aa, Synthetic construct
TLSDSLSGSSLYSTSANLPVMGHEKFPSDLDLDMFNGSLECDDADGLDFNFDSLISTQNVVGLNVGNFTGGWRRATRSFR

SEQ ID NO: 25891 - protein, 80 aa, Synthetic construct
TLSDSLSGSSLYSTSANLPVMGHEKFPSDLDLDMFNGSLECDMEDGLDFNFDSLISTQNVVGLNVGNFTGGWRRATRSFR

SEQ ID NO: 25892 - protein, 80 aa, Synthetic construct
TLSDSLSGSSLYSTSANLPVMGHEKFPSDLDLDMFNGSLECDMESIIRSELMDAISTQNVVGLNVGNFTGGWRRATRSFR

SEQ ID NO: 25893 - protein, 80 aa, Synthetic construct
TLSDSLSGSSLYSTSANLPVMGHEKFPSDLDLDMFNGSLECDMESIIRSELMDADGLDNVVGLNVGNFTGGWRRATRSFR

SEQ ID NO: 25894 - protein, 80 aa, Synthetic construct
TLSDSLSGSSLYSTSANLPVMGHEKFPSDLDLDMFNGSLECDMESIIRSELMDADGLDFNVGLNVGNFTGGWRRATRSFR

SEQ ID NO: 25895 - protein, 80 aa, Synthetic construct
TLSDSLSGSSLYSTSANLPVMGHEKFPSDLDLDMFNGSLECDMESIIRSELMDADGLDFNFDLNVGNFTGGWRRATRSFR

SEQ ID NO: 25896 - protein, 80 aa, Synthetic construct
TLSDSLSGSSLYSTSANLPVMGHEKFPSDLDLDMFNGSLECDMESIIRSELMDADGLDFNFDSLVGNFTGGWRRATRSFR

SEQ ID NO: 25897 - protein, 80 aa, Synthetic construct
TLSDSLSGSSLYSTSANLPVMGHEKFPSDLDLDMFNGSLECDMESIIRSELMDADGLDFNFDSLISNFTGGWRRATRSFR

SEQ ID NO: 25898 - protein, 80 aa, Synthetic construct
TLSDSLSGSSLYSTSANLPVMGHEKFPSDLDLDMFNGSLECDMESIIRSELMDADGLDFNFDSLISTQTGGWRRATRSFR

SEQ ID NO: 25899 - protein, 80 aa, Synthetic construct
TLSDSLSGSSLYSTSANLPVMGHEKFPSDLDLDMFNGSLECDMESIIRSELMDADGLDFNFDSLISTQNVGWRRATRSFR

SEQ ID NO: 25900 - protein, 80 aa, Synthetic construct
MGHEKFPSDLDLDMFNGSLECDMESIIRSELMDADGLDFNFDSLISTQNVVGLNVGNFTGAKQASSQSWVGWRRATRSFR

SEQ ID NO: 25901 - protein, 80 aa, Synthetic construct
LYHEKFPSDLDLDMFNGSLECDMESIIRSELMDADGLDFNFDSLISTQNVVGLNVGNFTGAKQASSQSWVGWRRATRSFR

SEQ ID NO: 25902 - protein, 80 aa, Synthetic construct
LYSTKFPSDLDLDMFNGSLECDMESIIRSELMDADGLDFNFDSLISTQNVVGLNVGNFTGAKQASSQSWVGWRRATRSFR

SEQ ID NO: 25903 - protein, 80 aa, Synthetic construct
LYSTSAPSDLDLDMFNGSLECDMESIIRSELMDADGLDFNFDSLISTQNVVGLNVGNFTGAKQASSQSWVGWRRATRSFR

SEQ ID NO: 25904 - protein, 80 aa, Synthetic construct
LYSTSANLDLDLDMFNGSLECDMESIIRSELMDADGLDFNFDSLISTQNVVGLNVGNFTGAKQASSQSWVGWRRATRSFR

SEQ ID NO: 25905 - protein, 80 aa, Synthetic construct
LYSTSANLPVDLDMFNGSLECDMESIIRSELMDADGLDFNFDSLISTQNVVGLNVGNFTGAKQASSQSWVGWRRATRSFR

SEQ ID NO: 25906 - protein, 80 aa, Synthetic construct
LYSTSANLPVMGDMFNGSLECDMESIIRSELMDADGLDFNFDSLISTQNVVGLNVGNFTGAKQASSQSWVGWRRATRSFR

SEQ ID NO: 25907 - protein, 80 aa, Synthetic construct
LYSTSANLPVMGHEFNGSLECDMESIIRSELMDADGLDFNFDSLISTQNVVGLNVGNFTGAKQASSQSWVGWRRATRSFR

SEQ ID NO: 25908 - protein, 80 aa, Synthetic construct
LYSTSANLPVMGHEKFPSLECDMESIIRSELMDADGLDFNFDSLISTQNVVGLNVGNFTGAKQASSQSWVGWRRATRSFR

SEQ ID NO: 25909 - protein, 80 aa, Synthetic construct
LYSTSANLPVMGHEKFPSDLDLDMFNGSLELMDADGLDFNFDSLISTQNVVGLNVGNFTGAKQASSQSWVGWRRATRSFR

SEQ ID NO: 25910 - protein, 80 aa, Synthetic construct
LYSTSANLPVMGHEKFPSDLDLDMFNGSLECDMEDGLDFNFDSLISTQNVVGLNVGNFTGAKQASSQSWVGWRRATRSFR

SEQ ID NO: 25911 - protein, 80 aa, Synthetic construct
LYSTSANLPVMGHEKFPSDLDLDMFNGSLECDMESIIRSELMDADGLDNVVGLNVGNFTGAKQASSQSWVGWRRATRSFR

SEQ ID NO: 25912 - protein, 80 aa, Synthetic construct
LYSTSANLPVMGHEKFPSDLDLDMFNGSLECDMESIIRSELMDADGLDFNVGLNVGNFTGAKQASSQSWVGWRRATRSFR

SEQ ID NO: 25913 - protein, 80 aa, Synthetic construct
LYSTSANLPVMGHEKFPSDLDLDMFNGSLECDMESIIRSELMDADGLDFNFDLNVGNFTGAKQASSQSWVGWRRATRSFR

SEQ ID NO: 25914 - protein, 80 aa, Synthetic construct
LYSTSANLPVMGHEKFPSDLDLDMFNGSLECDMESIIRSELMDADGLDFNFDSLVGNFTGAKQASSQSWVGWRRATRSFR

SEQ ID NO: 25915 - protein, 80 aa, Synthetic construct
LYSTSANLPVMGHEKFPSDLDLDMFNGSLECDMESIIRSELMDADGLDFNFDSLISNFTGAKQASSQSWVGWRRATRSFR

SEQ ID NO: 25916 - protein, 80 aa, Synthetic construct
LYSTSANLPVMGHEKFPSDLDLDMFNGSLECDMESIIRSELMDADGLDFNFDSLISTQTGAKQASSQSWVGWRRATRSFR

SEQ ID NO: 25917 - protein, 80 aa, Synthetic construct
LYSTSANLPVMGHEKFPSDLDLDMFNGSLECDMESIIRSELMDADGLDFNFDSLISTQNVAKQASSQSWVGWRRATRSFR

SEQ ID NO: 25918 - protein, 80 aa, Synthetic construct
LYSTSANLPVMGHEKFPSDLDLDMFNGSLECDMESIIRSELMDADGLDFNFDSLISTQNVVGQASSQSWVGWRRATRSFR

SEQ ID NO: 25919 - protein, 80 aa, Synthetic construct
LYSTSANLPVMGHEKFPSDLDLDMFNGSLECDMESIIRSELMDADGLDFNFDSLISTQNVVGLNSSQSWVGWRRATRSFR

SEQ ID NO: 25920 - protein, 80 aa, Synthetic construct
LYSTSANLPVMGHEKFPSDLDLDMFNGSLECDMESIIRSELMDADGLDFNFDSLISTQNVVGLNVGQSWVGWRRATRSFR

SEQ ID NO: 25921 - protein, 80 aa, Synthetic construct
HEKFPSDLDLDMFNGSLECDMESIIRSELMDADGLDFNFDSLISTQNVVGLNVGNFTGAKQASSQSWVPGGWRRATRSFR

SEQ ID NO: 25922 - protein, 80 aa, Synthetic construct
STKFPSDLDLDMFNGSLECDMESIIRSELMDADGLDFNFDSLISTQNVVGLNVGNFTGAKQASSQSWVPGGWRRATRSFR

SEQ ID NO: 25923 - protein, 80 aa, Synthetic construct
STSAPSDLDLDMFNGSLECDMESIIRSELMDADGLDFNFDSLISTQNVVGLNVGNFTGAKQASSQSWVPGGWRRATRSFR

SEQ ID NO: 25924 - protein, 80 aa, Synthetic construct
STSANLDLDLDMFNGSLECDMESIIRSELMDADGLDFNFDSLISTQNVVGLNVGNFTGAKQASSQSWVPGGWRRATRSFR

SEQ ID NO: 25925 - protein, 80 aa, Synthetic construct
STSANLPVDLDMFNGSLECDMESIIRSELMDADGLDFNFDSLISTQNVVGLNVGNFTGAKQASSQSWVPGGWRRATRSFR

SEQ ID NO: 25926 - protein, 80 aa, Synthetic construct
STSANLPVMGHEKFPSDLDLDMFNGSLECDMESILDFNFDSLISTQNVVGLNVGNFTGAKQASSQSWVPGGWRRATRSFR

SEQ ID NO: 25927 - protein, 80 aa, Synthetic construct
STSANLPVMGHEKFPSDLDLDMFNGSLECDMESIIRSELMDADGLDFNVGLNVGNFTGAKQASSQSWVPGGWRRATRSFR

SEQ ID NO: 25928 - protein, 80 aa, Synthetic construct
STSANLPVMGHEKFPSDLDLDMFNGSLECDMESIIRSELMDADGLDFNFDLNVGNFTGAKQASSQSWVPGGWRRATRSFR

SEQ ID NO: 25929 - protein, 80 aa, Synthetic construct
STSANLPVMGHEKFPSDLDLDMFNGSLECDMESIIRSELMDADGLDFNFDSLVGNFTGAKQASSQSWVPGGWRRATRSFR

SEQ ID NO: 25930 - protein, 80 aa, Synthetic construct
STSANLPVMGHEKFPSDLDLDMFNGSLECDMESIIRSELMDADGLDFNFDSLISNFTGAKQASSQSWVPGGWRRATRSFR

SEQ ID NO: 25931 - protein, 80 aa, Synthetic construct
STSANLPVMGHEKFPSDLDLDMFNGSLECDMESIIRSELMDADGLDFNFDSLISTQTGAKQASSQSWVPGGWRRATRSFR

SEQ ID NO: 25932 - protein, 80 aa, Synthetic construct
STSANLPVMGHEKFPSDLDLDMFNGSLECDMESIIRSELMDADGLDFNFDSLISTQNVAKQASSQSWVPGGWRRATRSFR

SEQ ID NO: 25933 - protein, 80 aa, Synthetic construct
STSANLPVMGHEKFPSDLDLDMFNGSLECDMESIIRSELMDADGLDFNFDSLISTQNVVGQASSQSWVPGGWRRATRSFR

SEQ ID NO: 25934 - protein, 80 aa, Synthetic construct
STSANLPVMGHEKFPSDLDLDMFNGSLECDMESIIRSELMDADGLDFNFDSLISTQNVVGLNSSQSWVPGGWRRATRSFR

SEQ ID NO: 25935 - protein, 80 aa, Synthetic construct
STSANLPVMGHEKFPSDLDLDMFNGSLECDMESIIRSELMDADGLDFNFDSLISTQNVVGLNVGQSWVPGGWRRATRSFR

SEQ ID NO: 25936 - protein, 80 aa, Synthetic construct
STSANLPVMGHEKFPSDLDLDMFNGSLECDMESIIRSELMDADGLDFNFDSLISTQNVVGLNVGNFWVPGGWRRATRSFR

SEQ ID NO: 25937 - protein, 80 aa, Synthetic construct
STSANLPVMGHEKFPSDLDLDMFNGSLECDMESIIRSELMDADGLDFNFDSLISTQNVVGLNVGNFTGPGGWRRATRSFR

SEQ ID NO: 25938 - protein, 80 aa, Synthetic construct
STSANLPVMGHEKFPSDLDLDMFNGSLECDMESIIRSELMDADGLDFNFDSLISTQNVVGLNVGNFTGAKGWRRATRSFR

SEQ ID NO: 25939 - protein, 80 aa, Synthetic construct
LLAFLLDEAVRAPLDWALPLSEVPSDWEVDDLLCSLLSPPASLNILSSSNPCLVHHDHTYSLPRETVSMDGWRRATRSFR

SEQ ID NO: 25940 - protein, 80 aa, Synthetic construct
LLAFLLEESGRAPLDWALPLSEVPSDWEVDDLLCSLLSPPASLNILSSSNPCLVHHDHTYSLPRETVSMDGWRRATRSFR

SEQ ID NO: 25941 - protein, 80 aa, Synthetic construct
LLAFLLEESGDLPLDWALPLSEVPSDWEVDDLLCSLLSPPASLNILSSSNPCLVHHDHTYSLPRETVSMDGWRRATRSFR

SEQ ID NO: 25942 - protein, 80 aa, Synthetic construct
LLAFLLEESGDLGTDWALPLSEVPSDWEVDDLLCSLLSPPASLNILSSSNPCLVHHDHTYSLPRETVSMDGWRRATRSFR

SEQ ID NO: 25943 - protein, 80 aa, Synthetic construct
LLAFLLEESGDLGTAPALPLSEVPSDWEVDDLLCSLLSPPASLNILSSSNPCLVHHDHTYSLPRETVSMDGWRRATRSFR

SEQ ID NO: 25944 - protein, 80 aa, Synthetic construct
LLAFLLEESGDLGTAPDEPLSEVPSDWEVDDLLCSLLSPPASLNILSSSNPCLVHHDHTYSLPRETVSMDGWRRATRSFR

SEQ ID NO: 25945 - protein, 80 aa, Synthetic construct
LLAFLLEESGDLGTAPDEAVSEVPSDWEVDDLLCSLLSPPASLNILSSSNPCLVHHDHTYSLPRETVSMDGWRRATRSFR

SEQ ID NO: 25946 - protein, 80 aa, Synthetic construct
LLAFLLEESGDLGTAPDEAVRAPLSDWEVDDLLCSLLSPPASLNILSSSNPCLVHHDHTYSLPRETVSMDGWRRATRSFR

SEQ ID NO: 25947 - protein, 80 aa, Synthetic construct
LLAFLLEESGDLGTAPDEAVRAPLDWWEVDDLLCSLLSPPASLNILSSSNPCLVHHDHTYSLPRETVSMDGWRRATRSFR

SEQ ID NO: 25948 - protein, 80 aa, Synthetic construct
LLAFLLEESGDLGTAPDEAVRAPLDWALPLSEVPSDWEVDDLLCSLLSPPPCLVHHDHTYSLPRETVSMDGWRRATRSFR

SEQ ID NO: 25949 - protein, 80 aa, Synthetic construct
LLAFLLEESGDLGTAPDEAVRAPLDWALPLSEVPSDWEVDDLLCSLLSPPASLNHHDHTYSLPRETVSMDGWRRATRSFR

SEQ ID NO: 25950 - protein, 80 aa, Synthetic construct
LLAFLLEESGDLGTAPDEAVRAPLDWALPLSEVPSDWEVDDLLCSLLSPPASLNILDHTYSLPRETVSMDGWRRATRSFR

SEQ ID NO: 25951 - protein, 80 aa, Synthetic construct
LLAFLLEESGDLGTAPDEAVRAPLDWALPLSEVPSDWEVDDLLCSLLSPPASLNILSSTYSLPRETVSMDGWRRATRSFR

SEQ ID NO: 25952 - protein, 80 aa, Synthetic construct
LLAFLLEESGDLGTAPDEAVRAPLDWALPLSEVPSDWEVDDLLCSLLSPPASLNILSSSNSLPRETVSMDGWRRATRSFR

SEQ ID NO: 25953 - protein, 80 aa, Synthetic construct
LLAFLLEESGDLGTAPDEAVRAPLDWALPLSEVPSDWEVDDLLCSLLSPPASLNILSSSNPCPRETVSMDGWRRATRSFR

SEQ ID NO: 25954 - protein, 80 aa, Synthetic construct
LLAFLLEESGDLGTAPDEAVRAPLDWALPLSEVPSDWEVDDLLCSLLSPPASLNILSSSNPCLVETVSMDGWRRATRSFR

SEQ ID NO: 25955 - protein, 80 aa, Synthetic construct
LLAFLLEESGDLGTAPDEAVRAPLDWALPLSEVPSDWEVDDLLCSLLSPPASLNILSSSNPCLVHHVSMDGWRRATRSFR

SEQ ID NO: 25956 - protein, 80 aa, Synthetic construct
LLAFLLEESGDLGTAPDEAVRAPLDWALPLSEVPSDWEVDDLLCSLLSPPASLNILSSSNPCLVHHDHMDGWRRATRSFR

SEQ ID NO: 25957 - protein, 80 aa, Synthetic construct
LLAFLLEESGDLGTAPDEAVRAPLDWALPLSEVPSDWEVDDLLCSLLSPPASLNILSSSNPCLVHHDHTYGWRRATRSFR

SEQ ID NO: 25958 - protein, 80 aa, Synthetic construct
QSTDYYAYFEDSPGYSGCDAQAVPSNNIYMEQAWAVNQPYTCSYPGNMFKSKDSDLDMALNQYSQPEYFTGWRRATRSFR

SEQ ID NO: 25959 - protein, 80 aa, Synthetic construct
HPTDYYAYFEDSPGYSGCDAQAVPSNNIYMEQAWAVNQPYTCSYPGNMFKSKDSDLDMALNQYSQPEYFTGWRRATRSFR

SEQ ID NO: 25960 - protein, 80 aa, Synthetic construct
HPAAYYAYFEDSPGYSGCDAQAVPSNNIYMEQAWAVNQPYTCSYPGNMFKSKDSDLDMALNQYSQPEYFTGWRRATRSFR

SEQ ID NO: 25961 - protein, 80 aa, Synthetic construct
HPAAGSNCYMQSTDYYGCDAQAVPSNNIYMEQAWAVNQPYTCSYPGNMFKSKDSDLDMALNQYSQPEYFTGWRRATRSFR

SEQ ID NO: 25962 - protein, 80 aa, Synthetic construct
HPAAGSNCYMQSTDYYAYDAQAVPSNNIYMEQAWAVNQPYTCSYPGNMFKSKDSDLDMALNQYSQPEYFTGWRRATRSFR

SEQ ID NO: 25963 - protein, 80 aa, Synthetic construct
HPAAGSNCYMQSTDYYAYFEDSPGYSGCDAEQAWAVNQPYTCSYPGNMFKSKDSDLDMALNQYSQPEYFTGWRRATRSFR

SEQ ID NO: 25964 - protein, 80 aa, Synthetic construct
HPAAGSNCYMQSTDYYAYFEDSPGYSGCDAQAAWAVNQPYTCSYPGNMFKSKDSDLDMALNQYSQPEYFTGWRRATRSFR

SEQ ID NO: 25965 - protein, 80 aa, Synthetic construct
HPAAGSNCYMQSTDYYAYFEDSPGYSGCDAQAVPAVNQPYTCSYPGNMFKSKDSDLDMALNQYSQPEYFTGWRRATRSFR

SEQ ID NO: 25966 - protein, 80 aa, Synthetic construct
HPAAGSNCYMQSTDYYAYFEDSPGYSGCDAQAVPSNNIPYTCSYPGNMFKSKDSDLDMALNQYSQPEYFTGWRRATRSFR

SEQ ID NO: 25967 - protein, 80 aa, Synthetic construct
HPAAGSNCYMQSTDYYAYFEDSPGYSGCDAQAVPSNNIYMTCSYPGNMFKSKDSDLDMALNQYSQPEYFTGWRRATRSFR

SEQ ID NO: 25968 - protein, 80 aa, Synthetic construct
HPAAGSNCYMQSTDYYAYFEDSPGYSGCDAQAVPSNNIYMEQSYPGNMFKSKDSDLDMALNQYSQPEYFTGWRRATRSFR

SEQ ID NO: 25969 - protein, 80 aa, Synthetic construct
HPAAGSNCYMQSTDYYAYFEDSPGYSGCDAQAVPSNNIYMEQAWPGNMFKSKDSDLDMALNQYSQPEYFTGWRRATRSFR

SEQ ID NO: 25970 - protein, 80 aa, Synthetic construct
HPAAGSNCYMQSTDYYAYFEDSPGYSGCDAQAVPSNNIYMEQAWAVNMFKSKDSDLDMALNQYSQPEYFTGWRRATRSFR

SEQ ID NO: 25971 - protein, 80 aa, Synthetic construct
HPAAGSNCYMQSTDYYAYFEDSPGYSGCDAQAVPSNNIYMEQAWAVNQFKSKDSDLDMALNQYSQPEYFTGWRRATRSFR

SEQ ID NO: 25972 - protein, 80 aa, Synthetic construct
HPAAGSNCYMQSTDYYAYFEDSPGYSGCDAQAVPSNNIYMEQAWAVNQPYSKDSDLDMALNQYSQPEYFTGWRRATRSFR

SEQ ID NO: 25973 - protein, 80 aa, Synthetic construct
HPAAGSNCYMQSTDYYAYFEDSPGYSGCDAQAVPSNNIYMEQAWAVNQPYTCDSDLDMALNQYSQPEYFTGWRRATRSFR

SEQ ID NO: 25974 - protein, 80 aa, Synthetic construct
HPAAGSNCYMQSTDYYAYFEDSPGYSGCDAQAVPSNNIYMEQAWAVNQPYTCSYPGNMALNQYSQPEYFTGWRRATRSFR

SEQ ID NO: 25975 - protein, 80 aa, Synthetic construct
HPAAGSNCYMQSTDYYAYFEDSPGYSGCDAQAVPSNNIYMEQAWAVNQPYTCSYPGNMFKSKDSQPEYFTGWRRATRSFR

SEQ ID NO: 25976 - protein, 80 aa, Synthetic construct
HPAAGSNCYMQSTDYYAYFEDSPGYSGCDAQAVPSNNIYMEQAWAVNQPYTCSYPGNMFKSKDSDLEYFTGWRRATRSFR

SEQ ID NO: 25977 - protein, 80 aa, Synthetic construct
HPAAGSNCYMQSTDYYAYFEDSPGYSGCDAQAVPSNNIYMEQAWAVNQPYTCSYPGNMFKSKDSDLDMFTGWRRATRSFR

SEQ ID NO: 25978 - protein, 80 aa, Synthetic construct
HPAAGSNCYMQSTDYYAYFEDSPGYSGCDAQAVPSNNIYMEQAWAVNQPYTCSYPGNMFKSKDSDLDMALGWRRATRSFR

SEQ ID NO: 25979 - protein, 80 aa, Synthetic construct
ESPFSPGLFHRLDEDWDSALFAELGYFTDTDELQLEAANETYENNFDNLDFDLDLMPWESDIWDINNQICGWRRATRSFR

SEQ ID NO: 25980 - protein, 80 aa, Synthetic construct
GEPFSPGLFHRLDEDWDSALFAELGYFTDTDELQLEAANETYENNFDNLDFDLDLMPWESDIWDINNQICGWRRATRSFR

SEQ ID NO: 25981 - protein, 80 aa, Synthetic construct
GEPASPGLFHRLDEDWDSALFAELGYFTDTDELQLEAANETYENNFDNLDFDLDLMPWESDIWDINNQICGWRRATRSFR

SEQ ID NO: 25982 - protein, 80 aa, Synthetic construct
GEPAGVGLFHRLDEDWDSALFAELGYFTDTDELQLEAANETYENNFDNLDFDLDLMPWESDIWDINNQICGWRRATRSFR

SEQ ID NO: 25983 - protein, 80 aa, Synthetic construct
GEPAGVAGFHRLDEDWDSALFAELGYFTDTDELQLEAANETYENNFDNLDFDLDLMPWESDIWDINNQICGWRRATRSFR

SEQ ID NO: 25984 - protein, 80 aa, Synthetic construct
GEPAGVAGTMRLDEDWDSALFAELGYFTDTDELQLEAANETYENNFDNLDFDLDLMPWESDIWDINNQICGWRRATRSFR

SEQ ID NO: 25985 - protein, 80 aa, Synthetic construct
GEPAGVAGTMESDEDWDSALFAELGYFTDTDELQLEAANETYENNFDNLDFDLDLMPWESDIWDINNQICGWRRATRSFR

SEQ ID NO: 25986 - protein, 80 aa, Synthetic construct
GEPAGVAGTMESPFDWDSALFAELGYFTDTDELQLEAANETYENNFDNLDFDLDLMPWESDIWDINNQICGWRRATRSFR

SEQ ID NO: 25987 - protein, 80 aa, Synthetic construct
GEPAGVAGTMESPFSPDSALFAELGYFTDTDELQLEAANETYENNFDNLDFDLDLMPWESDIWDINNQICGWRRATRSFR

SEQ ID NO: 25988 - protein, 80 aa, Synthetic construct
GEPAGVAGTMESPFSPGLALFAELGYFTDTDELQLEAANETYENNFDNLDFDLDLMPWESDIWDINNQICGWRRATRSFR

SEQ ID NO: 25989 - protein, 80 aa, Synthetic construct
GEPAGVAGTMESPFSPGLFHRLELGYFTDTDELQLEAANETYENNFDNLDFDLDLMPWESDIWDINNQICGWRRATRSFR

SEQ ID NO: 25990 - protein, 80 aa, Synthetic construct
GEPAGVAGTMESPFSPGLFHRLDEDWFTDTDELQLEAANETYENNFDNLDFDLDLMPWESDIWDINNQICGWRRATRSFR

SEQ ID NO: 25991 - protein, 80 aa, Synthetic construct
GEPAGVAGTMESPFSPGLFHRLDEDWDSDTDELQLEAANETYENNFDNLDFDLDLMPWESDIWDINNQICGWRRATRSFR

SEQ ID NO: 25992 - protein, 80 aa, Synthetic construct
GEPAGVAGTMESPFSPGLFHRLDEDWDSALDELQLEAANETYENNFDNLDFDLDLMPWESDIWDINNQICGWRRATRSFR

SEQ ID NO: 25993 - protein, 80 aa, Synthetic construct
GEPAGVAGTMESPFSPGLFHRLDEDWDSALFALQLEAANETYENNFDNLDFDLDLMPWESDIWDINNQICGWRRATRSFR

SEQ ID NO: 25994 - protein, 80 aa, Synthetic construct
GEPAGVAGTMESPFSPGLFHRLDEDWDSALFAELLEAANETYENNFDNLDFDLDLMPWESDIWDINNQICGWRRATRSFR

SEQ ID NO: 25995 - protein, 80 aa, Synthetic construct
GEPAGVAGTMESPFSPGLFHRLDEDWDSALFAELGYAANETYENNFDNLDFDLDLMPWESDIWDINNQICGWRRATRSFR

SEQ ID NO: 25996 - protein, 80 aa, Synthetic construct
GEPAGVAGTMESPFSPGLFHRLDEDWDSALFAELGYFTNETYENNFDNLDFDLDLMPWESDIWDINNQICGWRRATRSFR

SEQ ID NO: 25997 - protein, 80 aa, Synthetic construct
GEPAGVAGTMESPFSPGLFHRLDEDWDSALFAELGYFTDTTYENNFDNLDFDLDLMPWESDIWDINNQICGWRRATRSFR

SEQ ID NO: 25998 - protein, 80 aa, Synthetic construct
GEPAGVAGTMESPFSPGLFHRLDEDWDSALFAELGYFTDTDEENNFDNLDFDLDLMPWESDIWDINNQICGWRRATRSFR

SEQ ID NO: 25999 - protein, 80 aa, Synthetic construct
GEPAGVAGTMESPFSPGLFHRLDEDWDSALFAELGYFTDTDELQNFDNLDFDLDLMPWESDIWDINNQICGWRRATRSFR

SEQ ID NO: 26000 - protein, 80 aa, Synthetic construct
GEPAGVAGTMESPFSPGLFHRLDEDWDSALFAELGYFTDTDELQLEDNLDFDLDLMPWESDIWDINNQICGWRRATRSFR

SEQ ID NO: 26001 - protein, 80 aa, Synthetic construct
GEPAGVAGTMESPFSPGLFHRLDEDWDSALFAELGYFTDTDELQLEAALDFDLDLMPWESDIWDINNQICGWRRATRSFR

SEQ ID NO: 26002 - protein, 80 aa, Synthetic construct
GEPAGVAGTMESPFSPGLFHRLDEDWDSALFAELGYFTDTDELQLEAANEFDLDLMPWESDIWDINNQICGWRRATRSFR

SEQ ID NO: 26003 - protein, 80 aa, Synthetic construct
GEPAGVAGTMESPFSPGLFHRLDEDWDSALFAELGYFTDTDELQLEAANETYLDLMPWESDIWDINNQICGWRRATRSFR

SEQ ID NO: 26004 - protein, 80 aa, Synthetic construct
GEPAGVAGTMESPFSPGLFHRLDEDWDSALFAELGYFTDTDELQLEAANETYENLMPWESDIWDINNQICGWRRATRSFR

SEQ ID NO: 26005 - protein, 80 aa, Synthetic construct
GEPAGVAGTMESPFSPGLFHRLDEDWDSALFAELGYFTDTDELQLEAANETYENNFPWESDIWDINNQICGWRRATRSFR

SEQ ID NO: 26006 - protein, 80 aa, Synthetic construct
GEPAGVAGTMESPFSPGLFHRLDEDWDSALFAELGYFTDTDELQLEAANETYENNFDNESDIWDINNQICGWRRATRSFR

SEQ ID NO: 26007 - protein, 80 aa, Synthetic construct
GEPAGVAGTMESPFSPGLFHRLDEDWDSALFAELGYFTDTDELQLEAANETYENNFDNLDDIWDINNQICGWRRATRSFR

SEQ ID NO: 26008 - protein, 80 aa, Synthetic construct
GEPAGVAGTMESPFSPGLFHRLDEDWDSALFAELGYFTDTDELQLEAANETYENNFDNLDFDWDINNQICGWRRATRSFR

SEQ ID NO: 26009 - protein, 80 aa, Synthetic construct
GEPAGVAGTMESPFSPGLFHRLDEDWDSALFAELGYFTDTDELQLEAANETYENNFDNLDFDLDINNQICGWRRATRSFR

SEQ ID NO: 26010 - protein, 80 aa, Synthetic construct
GEPAGVAGTMESPFSPGLFHRLDEDWDSALFAELGYFTDTDELQLEAANETYENNFDNLDFDLDLMNQICGWRRATRSFR

SEQ ID NO: 26011 - protein, 80 aa, Synthetic construct
GEPAGVAGTMESPFSPGLFHRLDEDWDSALFAELGYFTDTDELQLEAANETYENNFDNLDFDLDLMPWICGWRRATRSFR

SEQ ID NO: 26012 - protein, 80 aa, Synthetic construct
GEPAGVAGTMESPFSPGLFHRLDEDWDSALFAELGYFTDTDELQLEAANETYENNFDNLDFDLDLMPWESGWRRATRSFR

SEQ ID NO: 26013 - protein, 80 aa, Synthetic construct
ESDEDWDSALFAELGYFTDTDELQLEAANETYENNFDNLDFDLDLMPWESDIWDINNQICTVKDIKAEPQGWRRATRSFR

SEQ ID NO: 26014 - protein, 80 aa, Synthetic construct
ESPFSPDSALFAELGYFTDTDELQLEAANETYENNFDNLDFDLDLMPWESDIWDINNQICTVKDIKAEPQGWRRATRSFR

SEQ ID NO: 26015 - protein, 80 aa, Synthetic construct
ESPFSPGLALFAELGYFTDTDELQLEAANETYENNFDNLDFDLDLMPWESDIWDINNQICTVKDIKAEPQGWRRATRSFR

SEQ ID NO: 26016 - protein, 80 aa, Synthetic construct
ESPFSPGLFHRLDEDWFTDTDELQLEAANETYENNFDNLDFDLDLMPWESDIWDINNQICTVKDIKAEPQGWRRATRSFR

SEQ ID NO: 26017 - protein, 80 aa, Synthetic construct
ESPFSPGLFHRLDEDWDSDTDELQLEAANETYENNFDNLDFDLDLMPWESDIWDINNQICTVKDIKAEPQGWRRATRSFR

SEQ ID NO: 26018 - protein, 80 aa, Synthetic construct
ESPFSPGLFHRLDEDWDSALDELQLEAANETYENNFDNLDFDLDLMPWESDIWDINNQICTVKDIKAEPQGWRRATRSFR

SEQ ID NO: 26019 - protein, 80 aa, Synthetic construct
ESPFSPGLFHRLDEDWDSALFAELLEAANETYENNFDNLDFDLDLMPWESDIWDINNQICTVKDIKAEPQGWRRATRSFR

SEQ ID NO: 26020 - protein, 80 aa, Synthetic construct
ESPFSPGLFHRLDEDWDSALFAELGYFTDTDELQNFDNLDFDLDLMPWESDIWDINNQICTVKDIKAEPQGWRRATRSFR

SEQ ID NO: 26021 - protein, 80 aa, Synthetic construct
ESPFSPGLFHRLDEDWDSALFAELGYFTDTDELQLEDNLDFDLDLMPWESDIWDINNQICTVKDIKAEPQGWRRATRSFR

SEQ ID NO: 26022 - protein, 80 aa, Synthetic construct
ESPFSPGLFHRLDEDWDSALFAELGYFTDTDELQLEAALDFDLDLMPWESDIWDINNQICTVKDIKAEPQGWRRATRSFR

SEQ ID NO: 26023 - protein, 80 aa, Synthetic construct
ESPFSPGLFHRLDEDWDSALFAELGYFTDTDELQLEAANEFDLDLMPWESDIWDINNQICTVKDIKAEPQGWRRATRSFR

SEQ ID NO: 26024 - protein, 80 aa, Synthetic construct
ESPFSPGLFHRLDEDWDSALFAELGYFTDTDELQLEAANETYLDLMPWESDIWDINNQICTVKDIKAEPQGWRRATRSFR

SEQ ID NO: 26025 - protein, 80 aa, Synthetic construct
ESPFSPGLFHRLDEDWDSALFAELGYFTDTDELQLEAANETYENLMPWESDIWDINNQICTVKDIKAEPQGWRRATRSFR

SEQ ID NO: 26026 - protein, 80 aa, Synthetic construct
ESPFSPGLFHRLDEDWDSALFAELGYFTDTDELQLEAANETYENNFPWESDIWDINNQICTVKDIKAEPQGWRRATRSFR

SEQ ID NO: 26027 - protein, 80 aa, Synthetic construct
ESPFSPGLFHRLDEDWDSALFAELGYFTDTDELQLEAANETYENNFDNESDIWDINNQICTVKDIKAEPQGWRRATRSFR

SEQ ID NO: 26028 - protein, 80 aa, Synthetic construct
ESPFSPGLFHRLDEDWDSALFAELGYFTDTDELQLEAANETYENNFDNLDDIWDINNQICTVKDIKAEPQGWRRATRSFR

SEQ ID NO: 26029 - protein, 80 aa, Synthetic construct
ESPFSPGLFHRLDEDWDSALFAELGYFTDTDELQLEAANETYENNFDNLDFDWDINNQICTVKDIKAEPQGWRRATRSFR

SEQ ID NO: 26030 - protein, 80 aa, Synthetic construct
ESPFSPGLFHRLDEDWDSALFAELGYFTDTDELQLEAANETYENNFDNLDFDLDINNQICTVKDIKAEPQGWRRATRSFR

SEQ ID NO: 26031 - protein, 80 aa, Synthetic construct
ESPFSPGLFHRLDEDWDSALFAELGYFTDTDELQLEAANETYENNFDNLDFDLDLMNQICTVKDIKAEPQGWRRATRSFR

SEQ ID NO: 26032 - protein, 80 aa, Synthetic construct
ESPFSPGLFHRLDEDWDSALFAELGYFTDTDELQLEAANETYENNFDNLDFDLDLMPWICTVKDIKAEPQGWRRATRSFR

SEQ ID NO: 26033 - protein, 80 aa, Synthetic construct
ESPFSPGLFHRLDEDWDSALFAELGYFTDTDELQLEAANETYENNFDNLDFDLDLMPWESTVKDIKAEPQGWRRATRSFR

SEQ ID NO: 26034 - protein, 80 aa, Synthetic construct
ESPFSPGLFHRLDEDWDSALFAELGYFTDTDELQLEAANETYENNFDNLDFDLDLMPWESDIKDIKAEPQGWRRATRSFR

SEQ ID NO: 26035 - protein, 80 aa, Synthetic construct
ESPFSPGLFHRLDEDWDSALFAELGYFTDTDELQLEAANETYENNFDNLDFDLDLMPWESDIWDIKAEPQGWRRATRSFR

SEQ ID NO: 26036 - protein, 80 aa, Synthetic construct
ESPFSPGLFHRLDEDWDSALFAELGYFTDTDELQLEAANETYENNFDNLDFDLDLMPWESDIWDINAEPQGWRRATRSFR

SEQ ID NO: 26037 - protein, 80 aa, Synthetic construct
ESPFSPGLFHRLDEDWDSALFAELGYFTDTDELQLEAANETYENNFDNLDFDLDLMPWESDIWDINNQPQGWRRATRSFR

SEQ ID NO: 26038 - protein, 80 aa, Synthetic construct
PTSAEYIPLTPAAADVNGSPATITIETCEDPGDWTAAIGDDTFTFWRGLKDAGLLDEVIQEFHQELVETMGWRRATRSFR

SEQ ID NO: 26039 - protein, 80 aa, Synthetic construct
LSSAEYIPLTPAAADVNGSPATITIETCEDPGDWTAAIGDDTFTFWRGLKDAGLLDEVIQEFHQELVETMGWRRATRSFR

SEQ ID NO: 26040 - protein, 80 aa, Synthetic construct
LSGAEYIPLTPAAADVNGSPATITIETCEDPGDWTAAIGDDTFTFWRGLKDAGLLDEVIQEFHQELVETMGWRRATRSFR

SEQ ID NO: 26041 - protein, 80 aa, Synthetic construct
LSGARVIPLTPAAADVNGSPATITIETCEDPGDWTAAIGDDTFTFWRGLKDAGLLDEVIQEFHQELVETMGWRRATRSFR

SEQ ID NO: 26042 - protein, 80 aa, Synthetic construct
LSGARVSLLTPAAADVNGSPATITIETCEDPGDWTAAIGDDTFTFWRGLKDAGLLDEVIQEFHQELVETMGWRRATRSFR

SEQ ID NO: 26043 - protein, 80 aa, Synthetic construct
LSGARVSLSSPAAADVNGSPATITIETCEDPGDWTAAIGDDTFTFWRGLKDAGLLDEVIQEFHQELVETMGWRRATRSFR

SEQ ID NO: 26044 - protein, 80 aa, Synthetic construct
LSGARVSLSSPTAADVNGSPATITIETCEDPGDWTAAIGDDTFTFWRGLKDAGLLDEVIQEFHQELVETMGWRRATRSFR

SEQ ID NO: 26045 - protein, 80 aa, Synthetic construct
LSGARVSLSSPTSADVNGSPATITIETCEDPGDWTAAIGDDTFTFWRGLKDAGLLDEVIQEFHQELVETMGWRRATRSFR

SEQ ID NO: 26046 - protein, 80 aa, Synthetic construct
LSGARVSLSSPTSAEYNGSPATITIETCEDPGDWTAAIGDDTFTFWRGLKDAGLLDEVIQEFHQELVETMGWRRATRSFR

SEQ ID NO: 26047 - protein, 80 aa, Synthetic construct
LSGARVSLSSPTSAEYIPSPATITIETCEDPGDWTAAIGDDTFTFWRGLKDAGLLDEVIQEFHQELVETMGWRRATRSFR

SEQ ID NO: 26048 - protein, 80 aa, Synthetic construct
LSGARVSLSSPTSAEYIPLTPAITIETCEDPGDWTAAIGDDTFTFWRGLKDAGLLDEVIQEFHQELVETMGWRRATRSFR

SEQ ID NO: 26049 - protein, 80 aa, Synthetic construct
LSGARVSLSSPTSAEYIPLTPAAAIETCEDPGDWTAAIGDDTFTFWRGLKDAGLLDEVIQEFHQELVETMGWRRATRSFR

SEQ ID NO: 26050 - protein, 80 aa, Synthetic construct
LSGARVSLSSPTSAEYIPLTPAAADVTCEDPGDWTAAIGDDTFTFWRGLKDAGLLDEVIQEFHQELVETMGWRRATRSFR

SEQ ID NO: 26051 - protein, 80 aa, Synthetic construct
LSGARVSLSSPTSAEYIPLTPAAADVNGEDPGDWTAAIGDDTFTFWRGLKDAGLLDEVIQEFHQELVETMGWRRATRSFR

SEQ ID NO: 26052 - protein, 80 aa, Synthetic construct
LSGARVSLSSPTSAEYIPLTPAAADVNGSPPGDWTAAIGDDTFTFWRGLKDAGLLDEVIQEFHQELVETMGWRRATRSFR

SEQ ID NO: 26053 - protein, 80 aa, Synthetic construct
LSGARVSLSSPTSAEYIPLTPAAADVNGSPATDWTAAIGDDTFTFWRGLKDAGLLDEVIQEFHQELVETMGWRRATRSFR

SEQ ID NO: 26054 - protein, 80 aa, Synthetic construct
LSGARVSLSSPTSAEYIPLTPAAADVNGSPATITTAAIGDDTFTFWRGLKDAGLLDEVIQEFHQELVETMGWRRATRSFR

SEQ ID NO: 26055 - protein, 80 aa, Synthetic construct
LSGARVSLSSPTSAEYIPLTPAAADVNGSPATITIEAIGDDTFTFWRGLKDAGLLDEVIQEFHQELVETMGWRRATRSFR

SEQ ID NO: 26056 - protein, 80 aa, Synthetic construct
LSGARVSLSSPTSAEYIPLTPAAADVNGSPATITIETCGDDTFTFWRGLKDAGLLDEVIQEFHQELVETMGWRRATRSFR

SEQ ID NO: 26057 - protein, 80 aa, Synthetic construct
LSGARVSLSSPTSAEYIPLTPAAADVNGSPATITIETCEDDTFTFWRGLKDAGLLDEVIQEFHQELVETMGWRRATRSFR

SEQ ID NO: 26058 - protein, 80 aa, Synthetic construct
LSGARVSLSSPTSAEYIPLTPAAADVNGSPATITIETCEDPGFTFWRGLKDAGLLDEVIQEFHQELVETMGWRRATRSFR

SEQ ID NO: 26059 - protein, 80 aa, Synthetic construct
LSGARVSLSSPTSAEYIPLTPAAADVNGSPATITIETCEDPGDWFWRGLKDAGLLDEVIQEFHQELVETMGWRRATRSFR

SEQ ID NO: 26060 - protein, 80 aa, Synthetic construct
LSGARVSLSSPTSAEYIPLTPAAADVNGSPATITIETCEDPGDWTAAILKDAGLLDEVIQEFHQELVETMGWRRATRSFR

SEQ ID NO: 26061 - protein, 80 aa, Synthetic construct
LSGARVSLSSPTSAEYIPLTPAAADVNGSPATITIETCEDPGDWTAAIGDDTGLLDEVIQEFHQELVETMGWRRATRSFR

SEQ ID NO: 26062 - protein, 80 aa, Synthetic construct
LSGARVSLSSPTSAEYIPLTPAAADVNGSPATITIETCEDPGDWTAAIGDDTFTLDEVIQEFHQELVETMGWRRATRSFR

SEQ ID NO: 26063 - protein, 80 aa, Synthetic construct
LSGARVSLSSPTSAEYIPLTPAAADVNGSPATITIETCEDPGDWTAAIGDDTFTFWEVIQEFHQELVETMGWRRATRSFR

SEQ ID NO: 26064 - protein, 80 aa, Synthetic construct
LSGARVSLSSPTSAEYIPLTPAAADVNGSPATITIETCEDPGDWTAAIGDDTFTFWRGIQEFHQELVETMGWRRATRSFR

SEQ ID NO: 26065 - protein, 80 aa, Synthetic construct
LSGARVSLSSPTSAEYIPLTPAAADVNGSPATITIETCEDPGDWTAAIGDDTFTFWRGLKEFHQELVETMGWRRATRSFR

SEQ ID NO: 26066 - protein, 80 aa, Synthetic construct
LSGARVSLSSPTSAEYIPLTPAAADVNGSPATITIETCEDPGDWTAAIGDDTFTFWRGLKDAGLELVETMGWRRATRSFR

SEQ ID NO: 26067 - protein, 80 aa, Synthetic construct
LSGARVSLSSPTSAEYIPLTPAAADVNGSPATITIETCEDPGDWTAAIGDDTFTFWRGLKDAGLLDVETMGWRRATRSFR

SEQ ID NO: 26068 - protein, 80 aa, Synthetic construct
LSGARVSLSSPTSAEYIPLTPAAADVNGSPATITIETCEDPGDWTAAIGDDTFTFWRGLKDAGLLDEVTMGWRRATRSFR

SEQ ID NO: 26069 - protein, 80 aa, Synthetic construct
LSGARVSLSSPTSAEYIPLTPAAADVNGSPATITIETCEDPGDWTAAIGDDTFTFWRGLKDAGLLDEVIQGWRRATRSFR

SEQ ID NO: 26070 - protein, 80 aa, Synthetic construct
SMIAPPPVMASAPIPKALGTPVLTPPTEAASQDRMPQDLDLDMYMENLECDMDNIISDLMDEGEGLDFNFGWRRATRSFR

SEQ ID NO: 26071 - protein, 80 aa, Synthetic construct
PGIAPPPVMASAPIPKALGTPVLTPPTEAASQDRMPQDLDLDMYMENLECDMDNIISDLMDEGEGLDFNFGWRRATRSFR

SEQ ID NO: 26072 - protein, 80 aa, Synthetic construct
PGPSPPPVMASAPIPKALGTPVLTPPTEAASQDRMPQDLDLDMYMENLECDMDNIISDLMDEGEGLDFNFGWRRATRSFR

SEQ ID NO: 26073 - protein, 80 aa, Synthetic construct
PGPSSLPVMASAPIPKALGTPVLTPPTEAASQDRMPQDLDLDMYMENLECDMDNIISDLMDEGEGLDFNFGWRRATRSFR

SEQ ID NO: 26074 - protein, 80 aa, Synthetic construct
PGPSSLVPMASAPIPKALGTPVLTPPTEAASQDRMPQDLDLDMYMENLECDMDNIISDLMDEGEGLDFNFGWRRATRSFR

SEQ ID NO: 26075 - protein, 80 aa, Synthetic construct
PGPSSLVPTLSAPIPKALGTPVLTPPTEAASQDRMPQDLDLDMYMENLECDMDNIISDLMDEGEGLDFNFGWRRATRSFR

SEQ ID NO: 26076 - protein, 80 aa, Synthetic construct
PGPSSLVPTLSMPIPKALGTPVLTPPTEAASQDRMPQDLDLDMYMENLECDMDNIISDLMDEGEGLDFNFGWRRATRSFR

SEQ ID NO: 26077 - protein, 80 aa, Synthetic construct
PGPSSLVPTLSMIAPKALGTPVLTPPTEAASQDRMPQDLDLDMYMENLECDMDNIISDLMDEGEGLDFNFGWRRATRSFR

SEQ ID NO: 26078 - protein, 80 aa, Synthetic construct
PGPSSLVPTLSMIAPPALGTPVLTPPTEAASQDRMPQDLDLDMYMENLECDMDNIISDLMDEGEGLDFNFGWRRATRSFR

SEQ ID NO: 26079 - protein, 80 aa, Synthetic construct
PGPSSLVPTLSMIAPPPVGTPVLTPPTEAASQDRMPQDLDLDMYMENLECDMDNIISDLMDEGEGLDFNFGWRRATRSFR

SEQ ID NO: 26080 - protein, 80 aa, Synthetic construct
PGPSSLVPTLSMIAPPPVMAPVLTPPTEAASQDRMPQDLDLDMYMENLECDMDNIISDLMDEGEGLDFNFGWRRATRSFR

SEQ ID NO: 26081 - protein, 80 aa, Synthetic construct
PGPSSLVPTLSMIAPPPVMASALTPPTEAASQDRMPQDLDLDMYMENLECDMDNIISDLMDEGEGLDFNFGWRRATRSFR

SEQ ID NO: 26082 - protein, 80 aa, Synthetic construct
PGPSSLVPTLSMIAPPPVMASAPIPPTEAASQDRMPQDLDLDMYMENLECDMDNIISDLMDEGEGLDFNFGWRRATRSFR

SEQ ID NO: 26083 - protein, 80 aa, Synthetic construct
PGPSSLVPTLSMIAPPPVMASAPIPKALAASQDRMPQDLDLDMYMENLECDMDNIISDLMDEGEGLDFNFGWRRATRSFR

SEQ ID NO: 26084 - protein, 80 aa, Synthetic construct
PGPSSLVPTLSMIAPPPVMASAPIPKALGTSQDRMPQDLDLDMYMENLECDMDNIISDLMDEGEGLDFNFGWRRATRSFR

SEQ ID NO: 26085 - protein, 80 aa, Synthetic construct
PGPSSLVPTLSMIAPPPVMASAPIPKALGTPVDRMPQDLDLDMYMENLECDMDNIISDLMDEGEGLDFNFGWRRATRSFR

SEQ ID NO: 26086 - protein, 80 aa, Synthetic construct
PGPSSLVPTLSMIAPPPVMASAPIPKALGTPVLTPPQDLDLDMYMENLECDMDNIISDLMDEGEGLDFNFGWRRATRSFR

SEQ ID NO: 26087 - protein, 80 aa, Synthetic construct
PGPSSLVPTLSMIAPPPVMASAPIPKALGTPVLTPPTELDLDMYMENLECDMDNIISDLMDEGEGLDFNFGWRRATRSFR

SEQ ID NO: 26088 - protein, 80 aa, Synthetic construct
PGPSSLVPTLSMIAPPPVMASAPIPKALGTPVLTPPTEAALDMYMENLECDMDNIISDLMDEGEGLDFNFGWRRATRSFR

SEQ ID NO: 26089 - protein, 80 aa, Synthetic construct
PGPSSLVPTLSMIAPPPVMASAPIPKALGTPVLTPPTEAASQMYMENLECDMDNIISDLMDEGEGLDFNFGWRRATRSFR

SEQ ID NO: 26090 - protein, 80 aa, Synthetic construct
PGPSSLVPTLSMIAPPPVMASAPIPKALGTPVLTPPTEAASQDRMPQDLDLDMYIISDLMDEGEGLDFNFGWRRATRSFR

SEQ ID NO: 26091 - protein, 80 aa, Synthetic construct
PGPSSLVPTLSMIAPPPVMASAPIPKALGTPVLTPPTEAASQDRMPQDLDLDMYMENLECDMDNIIDFNFGWRRATRSFR

SEQ ID NO: 26092 - protein, 80 aa, Synthetic construct
PGPSSLVPTLSMIAPPPVMASAPIPKALGTPVLTPPTEAASQDRMPQDLDLDMYMENLECDMDNIISDLMGWRRATRSFR

SEQ ID NO: 26093 - protein, 80 aa, Synthetic construct
PPPVMASAPIPKALGTPVLTPPTEAASQDRMPQDLDLDMYMENLECDMDNIISDLMDEGEGLDFNFEPDPGWRRATRSFR

SEQ ID NO: 26094 - protein, 80 aa, Synthetic construct
SLPVMASAPIPKALGTPVLTPPTEAASQDRMPQDLDLDMYMENLECDMDNIISDLMDEGEGLDFNFEPDPGWRRATRSFR

SEQ ID NO: 26095 - protein, 80 aa, Synthetic construct
SLVPMASAPIPKALGTPVLTPPTEAASQDRMPQDLDLDMYMENLECDMDNIISDLMDEGEGLDFNFEPDPGWRRATRSFR

SEQ ID NO: 26096 - protein, 80 aa, Synthetic construct
SLVPTLSAPIPKALGTPVLTPPTEAASQDRMPQDLDLDMYMENLECDMDNIISDLMDEGEGLDFNFEPDPGWRRATRSFR

SEQ ID NO: 26097 - protein, 80 aa, Synthetic construct
SLVPTLSMPIPKALGTPVLTPPTEAASQDRMPQDLDLDMYMENLECDMDNIISDLMDEGEGLDFNFEPDPGWRRATRSFR

SEQ ID NO: 26098 - protein, 80 aa, Synthetic construct
SLVPTLSMIAPKALGTPVLTPPTEAASQDRMPQDLDLDMYMENLECDMDNIISDLMDEGEGLDFNFEPDPGWRRATRSFR

SEQ ID NO: 26099 - protein, 80 aa, Synthetic construct
SLVPTLSMIAPPALGTPVLTPPTEAASQDRMPQDLDLDMYMENLECDMDNIISDLMDEGEGLDFNFEPDPGWRRATRSFR

SEQ ID NO: 26100 - protein, 80 aa, Synthetic construct
SLVPTLSMIAPPPVGTPVLTPPTEAASQDRMPQDLDLDMYMENLECDMDNIISDLMDEGEGLDFNFEPDPGWRRATRSFR

SEQ ID NO: 26101 - protein, 80 aa, Synthetic construct
SLVPTLSMIAPPPVMAPVLTPPTEAASQDRMPQDLDLDMYMENLECDMDNIISDLMDEGEGLDFNFEPDPGWRRATRSFR

SEQ ID NO: 26102 - protein, 80 aa, Synthetic construct
SLVPTLSMIAPPPVMASALTPPTEAASQDRMPQDLDLDMYMENLECDMDNIISDLMDEGEGLDFNFEPDPGWRRATRSFR

SEQ ID NO: 26103 - protein, 80 aa, Synthetic construct
SLVPTLSMIAPPPVMASAPIPPTEAASQDRMPQDLDLDMYMENLECDMDNIISDLMDEGEGLDFNFEPDPGWRRATRSFR

SEQ ID NO: 26104 - protein, 80 aa, Synthetic construct
SLVPTLSMIAPPPVMASAPIPKALAASQDRMPQDLDLDMYMENLECDMDNIISDLMDEGEGLDFNFEPDPGWRRATRSFR

SEQ ID NO: 26105 - protein, 80 aa, Synthetic construct
SLVPTLSMIAPPPVMASAPIPKALGTSQDRMPQDLDLDMYMENLECDMDNIISDLMDEGEGLDFNFEPDPGWRRATRSFR

SEQ ID NO: 26106 - protein, 80 aa, Synthetic construct
SLVPTLSMIAPPPVMASAPIPKALGTPVDRMPQDLDLDMYMENLECDMDNIISDLMDEGEGLDFNFEPDPGWRRATRSFR

SEQ ID NO: 26107 - protein, 80 aa, Synthetic construct
SLVPTLSMIAPPPVMASAPIPKALGTPVLTPPQDLDLDMYMENLECDMDNIISDLMDEGEGLDFNFEPDPGWRRATRSFR

SEQ ID NO: 26108 - protein, 80 aa, Synthetic construct
SLVPTLSMIAPPPVMASAPIPKALGTPVLTPPTELDLDMYMENLECDMDNIISDLMDEGEGLDFNFEPDPGWRRATRSFR

SEQ ID NO: 26109 - protein, 80 aa, Synthetic construct
SLVPTLSMIAPPPVMASAPIPKALGTPVLTPPTEAALDMYMENLECDMDNIISDLMDEGEGLDFNFEPDPGWRRATRSFR

SEQ ID NO: 26110 - protein, 80 aa, Synthetic construct
SLVPTLSMIAPPPVMASAPIPKALGTPVLTPPTEAASQMYMENLECDMDNIISDLMDEGEGLDFNFEPDPGWRRATRSFR

SEQ ID NO: 26111 - protein, 80 aa, Synthetic construct
SLVPTLSMIAPPPVMASAPIPKALGTPVLTPPTEAASQDRMPQDLDLDMYIISDLMDEGEGLDFNFEPDPGWRRATRSFR

SEQ ID NO: 26112 - protein, 80 aa, Synthetic construct
SLVPTLSMIAPPPVMASAPIPKALGTPVLTPPTEAASQDRMPQDLDLDMYMENLECDMDNIIDFNFEPDPGWRRATRSFR

SEQ ID NO: 26113 - protein, 80 aa, Synthetic construct
SLVPTLSMIAPPPVMASAPIPKALGTPVLTPPTEAASQDRMPQDLDLDMYMENLECDMDNIISDLMEPDPGWRRATRSFR

SEQ ID NO: 26114 - protein, 80 aa, Synthetic construct
SLVPTLSMIAPPPVMASAPIPKALGTPVLTPPTEAASQDRMPQDLDLDMYMENLECDMDNIISDLMDEDPGWRRATRSFR

SEQ ID NO: 26115 - protein, 80 aa, Synthetic construct
SLVPTLSMIAPPPVMASAPIPKALGTPVLTPPTEAASQDRMPQDLDLDMYMENLECDMDNIISDLMDEGEGWRRATRSFR

SEQ ID NO: 26116 - protein, 80 aa, Synthetic construct
DPTRFFTDNLLSPEDWGLQNSTLYSGLDEVAEEQTQLFRCPEQDVPFDGSSLDVGMDVSPSEPPWEKSEPGWRRATRSFR

SEQ ID NO: 26117 - protein, 80 aa, Synthetic construct
DPTRFFTDNLLSPEDWGLQNSTLYSGLDEVAEEQTQLFRCPEQDVPFDGSSLDVGMDVSPSEPPWELLEPGWRRATRSFR

SEQ ID NO: 26118 - protein, 80 aa, Synthetic construct
DPTRFFTDNLLSPEDWGLQNSTLYSGLDEVAEEQTQLFRCPEQDVPFDGSSLDVGMDVSPSEPPWELLPIGWRRATRSFR

SEQ ID NO: 26119 - protein, 80 aa, Synthetic construct
PTGVLELPKELSEIFDPTRECMSSELLEELMSSEVFAPLLRLSPPPGDHDYIYNLDESEGVCDLFDVPVLGWRRATRSFR

SEQ ID NO: 26120 - protein, 80 aa, Synthetic construct
STGVLELPKELSEIFDPTRECMSSELLEELMSSEVFAPLLRLSPPPGDHDYIYNLDESEGVCDLFDVPVLGWRRATRSFR

SEQ ID NO: 26121 - protein, 80 aa, Synthetic construct
STSFLELPKELSEIFDPTRECMSSELLEELMSSEVFAPLLRLSPPPGDHDYIYNLDESEGVCDLFDVPVLGWRRATRSFR

SEQ ID NO: 26122 - protein, 80 aa, Synthetic construct
STSFEPLPKELSEIFDPTRECMSSELLEELMSSEVFAPLLRLSPPPGDHDYIYNLDESEGVCDLFDVPVLGWRRATRSFR

SEQ ID NO: 26123 - protein, 80 aa, Synthetic construct
STSFEPIKADLSEIFDPTRECMSSELLEELMSSEVFAPLLRLSPPPGDHDYIYNLDESEGVCDLFDVPVLGWRRATRSFR

SEQ ID NO: 26124 - protein, 80 aa, Synthetic construct
STSFEPIKADPTGVFDPTRECMSSELLEELMSSEVFAPLLRLSPPPGDHDYIYNLDESEGVCDLFDVPVLGWRRATRSFR

SEQ ID NO: 26125 - protein, 80 aa, Synthetic construct
STSFEPIKADPTGVLEPTRECMSSELLEELMSSEVFAPLLRLSPPPGDHDYIYNLDESEGVCDLFDVPVLGWRRATRSFR

SEQ ID NO: 26126 - protein, 80 aa, Synthetic construct
STSFEPIKADPTGVLELPKECMSSELLEELMSSEVFAPLLRLSPPPGDHDYIYNLDESEGVCDLFDVPVLGWRRATRSFR

SEQ ID NO: 26127 - protein, 80 aa, Synthetic construct
STSFEPIKADPTGVLELPKELSSSELLEELMSSEVFAPLLRLSPPPGDHDYIYNLDESEGVCDLFDVPVLGWRRATRSFR

SEQ ID NO: 26128 - protein, 80 aa, Synthetic construct
STSFEPIKADPTGVLELPKELSEIFDPTELMSSEVFAPLLRLSPPPGDHDYIYNLDESEGVCDLFDVPVLGWRRATRSFR

SEQ ID NO: 26129 - protein, 80 aa, Synthetic construct
STSFEPIKADPTGVLELPKELSEIFDPTREMSSEVFAPLLRLSPPPGDHDYIYNLDESEGVCDLFDVPVLGWRRATRSFR

SEQ ID NO: 26130 - protein, 80 aa, Synthetic construct
STSFEPIKADPTGVLELPKELSEIFDPTRECMSEVFAPLLRLSPPPGDHDYIYNLDESEGVCDLFDVPVLGWRRATRSFR

SEQ ID NO: 26131 - protein, 80 aa, Synthetic construct
STSFEPIKADPTGVLELPKELSEIFDPTRECMSSVFAPLLRLSPPPGDHDYIYNLDESEGVCDLFDVPVLGWRRATRSFR

SEQ ID NO: 26132 - protein, 80 aa, Synthetic construct
STSFEPIKADPTGVLELPKELSEIFDPTRECMSSELAPLLRLSPPPGDHDYIYNLDESEGVCDLFDVPVLGWRRATRSFR

SEQ ID NO: 26133 - protein, 80 aa, Synthetic construct
STSFEPIKADPTGVLELPKELSEIFDPTRECMSSELLEELMSSPPPGDHDYIYNLDESEGVCDLFDVPVLGWRRATRSFR

SEQ ID NO: 26134 - protein, 80 aa, Synthetic construct
STSFEPIKADPTGVLELPKELSEIFDPTRECMSSELLEELMSSEPPGDHDYIYNLDESEGVCDLFDVPVLGWRRATRSFR

SEQ ID NO: 26135 - protein, 80 aa, Synthetic construct
STSFEPIKADPTGVLELPKELSEIFDPTRECMSSELLEELMSSEVFGDHDYIYNLDESEGVCDLFDVPVLGWRRATRSFR

SEQ ID NO: 26136 - protein, 80 aa, Synthetic construct
STSFEPIKADPTGVLELPKELSEIFDPTRECMSSELLEELMSSEVFAPHDYIYNLDESEGVCDLFDVPVLGWRRATRSFR

SEQ ID NO: 26137 - protein, 80 aa, Synthetic construct
STSFEPIKADPTGVLELPKELSEIFDPTRECMSSELLEELMSSEVFAPLLRLSPLDESEGVCDLFDVPVLGWRRATRSFR

SEQ ID NO: 26138 - protein, 80 aa, Synthetic construct
STSFEPIKADPTGVLELPKELSEIFDPTRECMSSELLEELMSSEVFAPLLRLSPPPESEGVCDLFDVPVLGWRRATRSFR

SEQ ID NO: 26139 - protein, 80 aa, Synthetic construct
STSFEPIKADPTGVLELPKELSEIFDPTRECMSSELLEELMSSEVFAPLLRLSPPPGDEGVCDLFDVPVLGWRRATRSFR

SEQ ID NO: 26140 - protein, 80 aa, Synthetic construct
STSFEPIKADPTGVLELPKELSEIFDPTRECMSSELLEELMSSEVFAPLLRLSPPPGDHDVCDLFDVPVLGWRRATRSFR

SEQ ID NO: 26141 - protein, 80 aa, Synthetic construct
STSFEPIKADPTGVLELPKELSEIFDPTRECMSSELLEELMSSEVFAPLLRLSPPPGDHDYIDLFDVPVLGWRRATRSFR

SEQ ID NO: 26142 - protein, 80 aa, Synthetic construct
STSFEPIKADPTGVLELPKELSEIFDPTRECMSSELLEELMSSEVFAPLLRLSPPPGDHDYIYNLDVPVLGWRRATRSFR

SEQ ID NO: 26143 - protein, 80 aa, Synthetic construct
STSFEPIKADPTGVLELPKELSEIFDPTRECMSSELLEELMSSEVFAPLLRLSPPPGDHDYIYNLDESVLGWRRATRSFR

SEQ ID NO: 26144 - protein, 80 aa, Synthetic construct
STSFEPIKADPTGVLELPKELSEIFDPTRECMSSELLEELMSSEVFAPLLRLSPPPGDHDYIYNLDESEGGWRRATRSFR

SEQ ID NO: 26145 - protein, 80 aa, Synthetic construct
GVLELPKELSEIFDPTRECMSSELLEELMSSEVFAPLLRLSPPPGDHDYIYNLDESEGVCDLFDVPVLNLGWRRATRSFR

SEQ ID NO: 26146 - protein, 80 aa, Synthetic construct
SFLELPKELSEIFDPTRECMSSELLEELMSSEVFAPLLRLSPPPGDHDYIYNLDESEGVCDLFDVPVLNLGWRRATRSFR

SEQ ID NO: 26147 - protein, 80 aa, Synthetic construct
SFEPLPKELSEIFDPTRECMSSELLEELMSSEVFAPLLRLSPPPGDHDYIYNLDESEGVCDLFDVPVLNLGWRRATRSFR

SEQ ID NO: 26148 - protein, 80 aa, Synthetic construct
SFEPIKADLSEIFDPTRECMSSELLEELMSSEVFAPLLRLSPPPGDHDYIYNLDESEGVCDLFDVPVLNLGWRRATRSFR

SEQ ID NO: 26149 - protein, 80 aa, Synthetic construct
SFEPIKADPTEIFDPTRECMSSELLEELMSSEVFAPLLRLSPPPGDHDYIYNLDESEGVCDLFDVPVLNLGWRRATRSFR

SEQ ID NO: 26150 - protein, 80 aa, Synthetic construct
SFEPIKADPTGVFDPTRECMSSELLEELMSSEVFAPLLRLSPPPGDHDYIYNLDESEGVCDLFDVPVLNLGWRRATRSFR

SEQ ID NO: 26151 - protein, 80 aa, Synthetic construct
SFEPIKADPTGVLEPTRECMSSELLEELMSSEVFAPLLRLSPPPGDHDYIYNLDESEGVCDLFDVPVLNLGWRRATRSFR

SEQ ID NO: 26152 - protein, 80 aa, Synthetic construct
SFEPIKADPTGVLELPRECMSSELLEELMSSEVFAPLLRLSPPPGDHDYIYNLDESEGVCDLFDVPVLNLGWRRATRSFR

SEQ ID NO: 26153 - protein, 80 aa, Synthetic construct
SFEPIKADPTGVLELPKECMSSELLEELMSSEVFAPLLRLSPPPGDHDYIYNLDESEGVCDLFDVPVLNLGWRRATRSFR

SEQ ID NO: 26154 - protein, 80 aa, Synthetic construct
SFEPIKADPTGVLELPKELSSSELLEELMSSEVFAPLLRLSPPPGDHDYIYNLDESEGVCDLFDVPVLNLGWRRATRSFR

SEQ ID NO: 26155 - protein, 80 aa, Synthetic construct
SFEPIKADPTGVLELPKELSEIELLEELMSSEVFAPLLRLSPPPGDHDYIYNLDESEGVCDLFDVPVLNLGWRRATRSFR

SEQ ID NO: 26156 - protein, 80 aa, Synthetic construct
SFEPIKADPTGVLELPKELSEIFDLEELMSSEVFAPLLRLSPPPGDHDYIYNLDESEGVCDLFDVPVLNLGWRRATRSFR

SEQ ID NO: 26157 - protein, 80 aa, Synthetic construct
SFEPIKADPTGVLELPKELSEIFDPTELMSSEVFAPLLRLSPPPGDHDYIYNLDESEGVCDLFDVPVLNLGWRRATRSFR

SEQ ID NO: 26158 - protein, 80 aa, Synthetic construct
SFEPIKADPTGVLELPKELSEIFDPTREMSSEVFAPLLRLSPPPGDHDYIYNLDESEGVCDLFDVPVLNLGWRRATRSFR

SEQ ID NO: 26159 - protein, 80 aa, Synthetic construct
SFEPIKADPTGVLELPKELSEIFDPTRECMSEVFAPLLRLSPPPGDHDYIYNLDESEGVCDLFDVPVLNLGWRRATRSFR

SEQ ID NO: 26160 - protein, 80 aa, Synthetic construct
SFEPIKADPTGVLELPKELSEIFDPTRECMSSVFAPLLRLSPPPGDHDYIYNLDESEGVCDLFDVPVLNLGWRRATRSFR

SEQ ID NO: 26161 - protein, 80 aa, Synthetic construct
SFEPIKADPTGVLELPKELSEIFDPTRECMSSELAPLLRLSPPPGDHDYIYNLDESEGVCDLFDVPVLNLGWRRATRSFR

SEQ ID NO: 26162 - protein, 80 aa, Synthetic construct
SFEPIKADPTGVLELPKELSEIFDPTRECMSSELLEELRLSPPPGDHDYIYNLDESEGVCDLFDVPVLNLGWRRATRSFR

SEQ ID NO: 26163 - protein, 80 aa, Synthetic construct
SFEPIKADPTGVLELPKELSEIFDPTRECMSSELLEELMSSPPPGDHDYIYNLDESEGVCDLFDVPVLNLGWRRATRSFR

SEQ ID NO: 26164 - protein, 80 aa, Synthetic construct
SFEPIKADPTGVLELPKELSEIFDPTRECMSSELLEELMSSEPPGDHDYIYNLDESEGVCDLFDVPVLNLGWRRATRSFR

SEQ ID NO: 26165 - protein, 80 aa, Synthetic construct
SFEPIKADPTGVLELPKELSEIFDPTRECMSSELLEELMSSEVFGDHDYIYNLDESEGVCDLFDVPVLNLGWRRATRSFR

SEQ ID NO: 26166 - protein, 80 aa, Synthetic construct
SFEPIKADPTGVLELPKELSEIFDPTRECMSSELLEELMSSEVFAPHDYIYNLDESEGVCDLFDVPVLNLGWRRATRSFR

SEQ ID NO: 26167 - protein, 80 aa, Synthetic construct
SFEPIKADPTGVLELPKELSEIFDPTRECMSSELLEELMSSEVFAPLLRLSPLDESEGVCDLFDVPVLNLGWRRATRSFR

SEQ ID NO: 26168 - protein, 80 aa, Synthetic construct
SFEPIKADPTGVLELPKELSEIFDPTRECMSSELLEELMSSEVFAPLLRLSPPPESEGVCDLFDVPVLNLGWRRATRSFR

SEQ ID NO: 26169 - protein, 80 aa, Synthetic construct
SFEPIKADPTGVLELPKELSEIFDPTRECMSSELLEELMSSEVFAPLLRLSPPPGDEGVCDLFDVPVLNLGWRRATRSFR

SEQ ID NO: 26170 - protein, 80 aa, Synthetic construct
SFEPIKADPTGVLELPKELSEIFDPTRECMSSELLEELMSSEVFAPLLRLSPPPGDHDVCDLFDVPVLNLGWRRATRSFR

SEQ ID NO: 26171 - protein, 80 aa, Synthetic construct
SFEPIKADPTGVLELPKELSEIFDPTRECMSSELLEELMSSEVFAPLLRLSPPPGDHDYIDLFDVPVLNLGWRRATRSFR

SEQ ID NO: 26172 - protein, 80 aa, Synthetic construct
SFEPIKADPTGVLELPKELSEIFDPTRECMSSELLEELMSSEVFAPLLRLSPPPGDHDYIYNFDVPVLNLGWRRATRSFR

SEQ ID NO: 26173 - protein, 80 aa, Synthetic construct
SFEPIKADPTGVLELPKELSEIFDPTRECMSSELLEELMSSEVFAPLLRLSPPPGDHDYIYNLDVPVLNLGWRRATRSFR

SEQ ID NO: 26174 - protein, 80 aa, Synthetic construct
SFEPIKADPTGVLELPKELSEIFDPTRECMSSELLEELMSSEVFAPLLRLSPPPGDHDYIYNLDESVLNLGWRRATRSFR

SEQ ID NO: 26175 - protein, 80 aa, Synthetic construct
SFEPIKADPTGVLELPKELSEIFDPTRECMSSELLEELMSSEVFAPLLRLSPPPGDHDYIYNLDESEGNLGWRRATRSFR

SEQ ID NO: 26176 - protein, 80 aa, Synthetic construct
SFEPIKADPTGVLELPKELSEIFDPTRECMSSELLEELMSSEVFAPLLRLSPPPGDHDYIYNLDESEGVCGWRRATRSFR

SEQ ID NO: 26177 - protein, 80 aa, Synthetic construct
MSALGGYSSVSSCNGYGRMGLLHQEKLPSDLDGMFIERLDCDMESIIRNDLMDGDTLDFNFDNVLPNQSFGWRRATRSFR

SEQ ID NO: 26178 - protein, 80 aa, Synthetic construct
VQALGGYSSVSSCNGYGRMGLLHQEKLPSDLDGMFIERLDCDMESIIRNDLMDGDTLDFNFDNVLPNQSFGWRRATRSFR

SEQ ID NO: 26179 - protein, 80 aa, Synthetic construct
VQVPGGYSSVSSCNGYGRMGLLHQEKLPSDLDGMFIERLDCDMESIIRNDLMDGDTLDFNFDNVLPNQSFGWRRATRSFR

SEQ ID NO: 26180 - protein, 80 aa, Synthetic construct
VQVPLPYSSVSSCNGYGRMGLLHQEKLPSDLDGMFIERLDCDMESIIRNDLMDGDTLDFNFDNVLPNQSFGWRRATRSFR

SEQ ID NO: 26181 - protein, 80 aa, Synthetic construct
VQVPLPHPSVSSCNGYGRMGLLHQEKLPSDLDGMFIERLDCDMESIIRNDLMDGDTLDFNFDNVLPNQSFGWRRATRSFR

SEQ ID NO: 26182 - protein, 80 aa, Synthetic construct
VQVPLPHPMQSSCNGYGRMGLLHQEKLPSDLDGMFIERLDCDMESIIRNDLMDGDTLDFNFDNVLPNQSFGWRRATRSFR

SEQ ID NO: 26183 - protein, 80 aa, Synthetic construct
VQVPLPHPMQMSCNGYGRMGLLHQEKLPSDLDGMFIERLDCDMESIIRNDLMDGDTLDFNFDNVLPNQSFGWRRATRSFR

SEQ ID NO: 26184 - protein, 80 aa, Synthetic construct
VQVPLPHPMQMSALGYGRMGLLHQEKLPSDLDGMFIERLDCDMESIIRNDLMDGDTLDFNFDNVLPNQSFGWRRATRSFR

SEQ ID NO: 26185 - protein, 80 aa, Synthetic construct
VQVPLPHPMQMSALGGGRMGLLHQEKLPSDLDGMFIERLDCDMESIIRNDLMDGDTLDFNFDNVLPNQSFGWRRATRSFR

SEQ ID NO: 26186 - protein, 80 aa, Synthetic construct
VQVPLPHPMQMSALGGYSMGLLHQEKLPSDLDGMFIERLDCDMESIIRNDLMDGDTLDFNFDNVLPNQSFGWRRATRSFR

SEQ ID NO: 26187 - protein, 80 aa, Synthetic construct
VQVPLPHPMQMSALGGYSSVLLHQEKLPSDLDGMFIERLDCDMESIIRNDLMDGDTLDFNFDNVLPNQSFGWRRATRSFR

SEQ ID NO: 26188 - protein, 80 aa, Synthetic construct
VQVPLPHPMQMSALGGYSSVSSHQEKLPSDLDGMFIERLDCDMESIIRNDLMDGDTLDFNFDNVLPNQSFGWRRATRSFR

SEQ ID NO: 26189 - protein, 80 aa, Synthetic construct
VQVPLPHPMQMSALGGYSSVSSCNEKLPSDLDGMFIERLDCDMESIIRNDLMDGDTLDFNFDNVLPNQSFGWRRATRSFR

SEQ ID NO: 26190 - protein, 80 aa, Synthetic construct
VQVPLPHPMQMSALGGYSSVSSCNGYLPSDLDGMFIERLDCDMESIIRNDLMDGDTLDFNFDNVLPNQSFGWRRATRSFR

SEQ ID NO: 26191 - protein, 80 aa, Synthetic construct
VQVPLPHPMQMSALGGYSSVSSCNGYGRSDLDGMFIERLDCDMESIIRNDLMDGDTLDFNFDNVLPNQSFGWRRATRSFR

SEQ ID NO: 26192 - protein, 80 aa, Synthetic construct
VQVPLPHPMQMSALGGYSSVSSCNGYGRMGLLHQEKLPSDLDGMFIERLDCDMESILDFNFDNVLPNQSFGWRRATRSFR

SEQ ID NO: 26193 - protein, 80 aa, Synthetic construct
VQVPLPHPMQMSALGGYSSVSSCNGYGRMGLLHQEKLPSDLDGMFIERLDCDMESIIRNDLMDGDTLDSFGWRRATRSFR

SEQ ID NO: 26194 - protein, 80 aa, Synthetic construct
VQVPLPHPMQMSALGGYSSVSSCNGYGRMGLLHQEKLPSDLDGMFIERLDCDMESIIRNDLMDGDTLDFNGWRRATRSFR

SEQ ID NO: 26195 - protein, 80 aa, Synthetic construct
SSCNGYGRMGLLHQEKLPSDLDGMFIERLDCDMESIIRNDLMDGDTLDFNFDNVLPNQSFPHSVKTTTHSGWRRATRSFR

SEQ ID NO: 26196 - protein, 80 aa, Synthetic construct
MSCNGYGRMGLLHQEKLPSDLDGMFIERLDCDMESIIRNDLMDGDTLDFNFDNVLPNQSFPHSVKTTTHSGWRRATRSFR

SEQ ID NO: 26197 - protein, 80 aa, Synthetic construct
MSALGYGRMGLLHQEKLPSDLDGMFIERLDCDMESIIRNDLMDGDTLDFNFDNVLPNQSFPHSVKTTTHSGWRRATRSFR

SEQ ID NO: 26198 - protein, 80 aa, Synthetic construct
MSALGGGRMGLLHQEKLPSDLDGMFIERLDCDMESIIRNDLMDGDTLDFNFDNVLPNQSFPHSVKTTTHSGWRRATRSFR

SEQ ID NO: 26199 - protein, 80 aa, Synthetic construct
MSALGGYSMGLLHQEKLPSDLDGMFIERLDCDMESIIRNDLMDGDTLDFNFDNVLPNQSFPHSVKTTTHSGWRRATRSFR

SEQ ID NO: 26200 - protein, 80 aa, Synthetic construct
MSALGGYSSVLLHQEKLPSDLDGMFIERLDCDMESIIRNDLMDGDTLDFNFDNVLPNQSFPHSVKTTTHSGWRRATRSFR

SEQ ID NO: 26201 - protein, 80 aa, Synthetic construct
MSALGGYSSVSSHQEKLPSDLDGMFIERLDCDMESIIRNDLMDGDTLDFNFDNVLPNQSFPHSVKTTTHSGWRRATRSFR

SEQ ID NO: 26202 - protein, 80 aa, Synthetic construct
MSALGGYSSVSSCNEKLPSDLDGMFIERLDCDMESIIRNDLMDGDTLDFNFDNVLPNQSFPHSVKTTTHSGWRRATRSFR

SEQ ID NO: 26203 - protein, 80 aa, Synthetic construct
MSALGGYSSVSSCNGYLPSDLDGMFIERLDCDMESIIRNDLMDGDTLDFNFDNVLPNQSFPHSVKTTTHSGWRRATRSFR

SEQ ID NO: 26204 - protein, 80 aa, Synthetic construct
MSALGGYSSVSSCNGYGRMGLLHQEKLPSDLDGMFIERLDCDMESIIRNDLMDGDTLDFNFDSVKTTTHSGWRRATRSFR

SEQ ID NO: 26205 - protein, 80 aa, Synthetic construct
MSALGGYSSVSSCNGYGRMGLLHQEKLPSDLDGMFIERLDCDMESIIRNDLMDGDTLDFNFDNVKTTTHSGWRRATRSFR

SEQ ID NO: 26206 - protein, 80 aa, Synthetic construct
MSALGGYSSVSSCNGYGRMGLLHQEKLPSDLDGMFIERLDCDMESIIRNDLMDGDTLDFNFDNVLPTTHSGWRRATRSFR

SEQ ID NO: 26207 - protein, 80 aa, Synthetic construct
MSALGGYSSVSSCNGYGRMGLLHQEKLPSDLDGMFIERLDCDMESIIRNDLMDGDTLDFNFDNVLPNQHSGWRRATRSFR

SEQ ID NO: 26208 - protein, 80 aa, Synthetic construct
QDIEQVWEELLSIPELQCLNIENDKLVETTMVPSPEAKLTEVDNYHFYSSIPSMEKEVGNCSPHFLNAFEGWRRATRSFR

SEQ ID NO: 26209 - protein, 80 aa, Synthetic construct
VAIEQVWEELLSIPELQCLNIENDKLVETTMVPSPEAKLTEVDNYHFYSSIPSMEKEVGNCSPHFLNAFEGWRRATRSFR

SEQ ID NO: 26210 - protein, 80 aa, Synthetic construct
VAPVDLWEELLSIPELQCLNIENDKLVETTMVPSPEAKLTEVDNYHFYSSIPSMEKEVGNCSPHFLNAFEGWRRATRSFR

SEQ ID NO: 26211 - protein, 80 aa, Synthetic construct
VAPVDLDGMQQDIEQVWEELLSNDKLVETTMVPSPEAKLTEVDNYHFYSSIPSMEKEVGNCSPHFLNAFEGWRRATRSFR

SEQ ID NO: 26212 - protein, 80 aa, Synthetic construct
VAPVDLDGMQQDIEQVWEELLSIPKLVETTMVPSPEAKLTEVDNYHFYSSIPSMEKEVGNCSPHFLNAFEGWRRATRSFR

SEQ ID NO: 26213 - protein, 80 aa, Synthetic construct
VAPVDLDGMQQDIEQVWEELLSIPELVETTMVPSPEAKLTEVDNYHFYSSIPSMEKEVGNCSPHFLNAFEGWRRATRSFR

SEQ ID NO: 26214 - protein, 80 aa, Synthetic construct
VAPVDLDGMQQDIEQVWEELLSIPELQCTTMVPSPEAKLTEVDNYHFYSSIPSMEKEVGNCSPHFLNAFEGWRRATRSFR

SEQ ID NO: 26215 - protein, 80 aa, Synthetic construct
VAPVDLDGMQQDIEQVWEELLSIPELQCLNMVPSPEAKLTEVDNYHFYSSIPSMEKEVGNCSPHFLNAFEGWRRATRSFR

SEQ ID NO: 26216 - protein, 80 aa, Synthetic construct
VAPVDLDGMQQDIEQVWEELLSIPELQCLNIEPSPEAKLTEVDNYHFYSSIPSMEKEVGNCSPHFLNAFEGWRRATRSFR

SEQ ID NO: 26217 - protein, 80 aa, Synthetic construct
VAPVDLDGMQQDIEQVWEELLSIPELQCLNIENDPEAKLTEVDNYHFYSSIPSMEKEVGNCSPHFLNAFEGWRRATRSFR

SEQ ID NO: 26218 - protein, 80 aa, Synthetic construct
VAPVDLDGMQQDIEQVWEELLSIPELQCLNIENDKLAKLTEVDNYHFYSSIPSMEKEVGNCSPHFLNAFEGWRRATRSFR

SEQ ID NO: 26219 - protein, 80 aa, Synthetic construct
VAPVDLDGMQQDIEQVWEELLSIPELQCLNIENDKLVELTEVDNYHFYSSIPSMEKEVGNCSPHFLNAFEGWRRATRSFR

SEQ ID NO: 26220 - protein, 80 aa, Synthetic construct
VAPVDLDGMQQDIEQVWEELLSIPELQCLNIENDKLVETTEVDNYHFYSSIPSMEKEVGNCSPHFLNAFEGWRRATRSFR

SEQ ID NO: 26221 - protein, 80 aa, Synthetic construct
VAPVDLDGMQQDIEQVWEELLSIPELQCLNIENDKLVETTMVDNYHFYSSIPSMEKEVGNCSPHFLNAFEGWRRATRSFR

SEQ ID NO: 26222 - protein, 80 aa, Synthetic construct
VAPVDLDGMQQDIEQVWEELLSIPELQCLNIENDKLVETTMVPSYHFYSSIPSMEKEVGNCSPHFLNAFEGWRRATRSFR

SEQ ID NO: 26223 - protein, 80 aa, Synthetic construct
VAPVDLDGMQQDIEQVWEELLSIPELQCLNIENDKLVETTMVPSPEFYSSIPSMEKEVGNCSPHFLNAFEGWRRATRSFR

SEQ ID NO: 26224 - protein, 80 aa, Synthetic construct
VAPVDLDGMQQDIEQVWEELLSIPELQCLNIENDKLVETTMVPSPEAKSSIPSMEKEVGNCSPHFLNAFEGWRRATRSFR

SEQ ID NO: 26225 - protein, 80 aa, Synthetic construct
VAPVDLDGMQQDIEQVWEELLSIPELQCLNIENDKLVETTMVPSPEAKLTIPSMEKEVGNCSPHFLNAFEGWRRATRSFR

SEQ ID NO: 26226 - protein, 80 aa, Synthetic construct
VAPVDLDGMQQDIEQVWEELLSIPELQCLNIENDKLVETTMVPSPEAKLTEVSMEKEVGNCSPHFLNAFEGWRRATRSFR

SEQ ID NO: 26227 - protein, 80 aa, Synthetic construct
VAPVDLDGMQQDIEQVWEELLSIPELQCLNIENDKLVETTMVPSPEAKLTEVDNEKEVGNCSPHFLNAFEGWRRATRSFR

SEQ ID NO: 26228 - protein, 80 aa, Synthetic construct
VAPVDLDGMQQDIEQVWEELLSIPELQCLNIENDKLVETTMVPSPEAKLTEVDNYHEVGNCSPHFLNAFEGWRRATRSFR

SEQ ID NO: 26229 - protein, 80 aa, Synthetic construct
VAPVDLDGMQQDIEQVWEELLSIPELQCLNIENDKLVETTMVPSPEAKLTEVDNYHFYGNCSPHFLNAFEGWRRATRSFR

SEQ ID NO: 26230 - protein, 80 aa, Synthetic construct
VAPVDLDGMQQDIEQVWEELLSIPELQCLNIENDKLVETTMVPSPEAKLTEVDNYHFYSSCSPHFLNAFEGWRRATRSFR

SEQ ID NO: 26231 - protein, 80 aa, Synthetic construct
VAPVDLDGMQQDIEQVWEELLSIPELQCLNIENDKLVETTMVPSPEAKLTEVDNYHFYSSIPPHFLNAFEGWRRATRSFR

SEQ ID NO: 26232 - protein, 80 aa, Synthetic construct
VAPVDLDGMQQDIEQVWEELLSIPELQCLNIENDKLVETTMVPSPEAKLTEVDNYHFYSSIPSMFLNAFEGWRRATRSFR

SEQ ID NO: 26233 - protein, 80 aa, Synthetic construct
VAPVDLDGMQQDIEQVWEELLSIPELQCLNIENDKLVETTMVPSPEAKLTEVDNYHFYSSIPSMEKNAFEGWRRATRSFR

SEQ ID NO: 26234 - protein, 80 aa, Synthetic construct
VAPVDLDGMQQDIEQVWEELLSIPELQCLNIENDKLVETTMVPSPEAKLTEVDNYHFYSSIPSMEKEVFEGWRRATRSFR

SEQ ID NO: 26235 - protein, 80 aa, Synthetic construct
VAPVDLDGMQQDIEQVWEELLSIPELQCLNIENDKLVETTMVPSPEAKLTEVDNYHFYSSIPSMEKEVGNGWRRATRSFR

SEQ ID NO: 26236 - protein, 80 aa, Synthetic construct
FPDLALQGDTPTATAETCWKGTSSSLASFPQLDWGSALLHPEVPWGAEPDSQALPWSGDWTDMACTAWDSGWRRATRSFR

SEQ ID NO: 26237 - protein, 80 aa, Synthetic construct
GLDLALQGDTPTATAETCWKGTSSSLASFPQLDWGSALLHPEVPWGAEPDSQALPWSGDWTDMACTAWDSGWRRATRSFR

SEQ ID NO: 26238 - protein, 80 aa, Synthetic construct
GLEGALQGDTPTATAETCWKGTSSSLASFPQLDWGSALLHPEVPWGAEPDSQALPWSGDWTDMACTAWDSGWRRATRSFR

SEQ ID NO: 26239 - protein, 80 aa, Synthetic construct
GLEGAKQGDTPTATAETCWKGTSSSLASFPQLDWGSALLHPEVPWGAEPDSQALPWSGDWTDMACTAWDSGWRRATRSFR

SEQ ID NO: 26240 - protein, 80 aa, Synthetic construct
GLEGAKLGDTPTATAETCWKGTSSSLASFPQLDWGSALLHPEVPWGAEPDSQALPWSGDWTDMACTAWDSGWRRATRSFR

SEQ ID NO: 26241 - protein, 80 aa, Synthetic construct
GLEGAKLGFCPTATAETCWKGTSSSLASFPQLDWGSALLHPEVPWGAEPDSQALPWSGDWTDMACTAWDSGWRRATRSFR

SEQ ID NO: 26242 - protein, 80 aa, Synthetic construct
GLEGAKLGFCFPATAETCWKGTSSSLASFPQLDWGSALLHPEVPWGAEPDSQALPWSGDWTDMACTAWDSGWRRATRSFR

SEQ ID NO: 26243 - protein, 80 aa, Synthetic construct
GLEGAKLGFCFPDLALQGDTGTSSSLASFPQLDWGSALLHPEVPWGAEPDSQALPWSGDWTDMACTAWDSGWRRATRSFR

SEQ ID NO: 26244 - protein, 80 aa, Synthetic construct
GLEGAKLGFCFPDLALQGDTPTSSSLASFPQLDWGSALLHPEVPWGAEPDSQALPWSGDWTDMACTAWDSGWRRATRSFR

SEQ ID NO: 26245 - protein, 80 aa, Synthetic construct
GLEGAKLGFCFPDLALQGDTPTATSLASFPQLDWGSALLHPEVPWGAEPDSQALPWSGDWTDMACTAWDSGWRRATRSFR

SEQ ID NO: 26246 - protein, 80 aa, Synthetic construct
GLEGAKLGFCFPDLALQGDTPTATAEASFPQLDWGSALLHPEVPWGAEPDSQALPWSGDWTDMACTAWDSGWRRATRSFR

SEQ ID NO: 26247 - protein, 80 aa, Synthetic construct
GLEGAKLGFCFPDLALQGDTPTATAETCFPQLDWGSALLHPEVPWGAEPDSQALPWSGDWTDMACTAWDSGWRRATRSFR

SEQ ID NO: 26248 - protein, 80 aa, Synthetic construct
GLEGAKLGFCFPDLALQGDTPTATAETCWKQLDWGSALLHPEVPWGAEPDSQALPWSGDWTDMACTAWDSGWRRATRSFR

SEQ ID NO: 26249 - protein, 80 aa, Synthetic construct
GLEGAKLGFCFPDLALQGDTPTATAETCWKGTDWGSALLHPEVPWGAEPDSQALPWSGDWTDMACTAWDSGWRRATRSFR

SEQ ID NO: 26250 - protein, 80 aa, Synthetic construct
GLEGAKLGFCFPDLALQGDTPTATAETCWKGTSSGSALLHPEVPWGAEPDSQALPWSGDWTDMACTAWDSGWRRATRSFR

SEQ ID NO: 26251 - protein, 80 aa, Synthetic construct
GLEGAKLGFCFPDLALQGDTPTATAETCWKGTSSSLALLHPEVPWGAEPDSQALPWSGDWTDMACTAWDSGWRRATRSFR

SEQ ID NO: 26252 - protein, 80 aa, Synthetic construct
GLEGAKLGFCFPDLALQGDTPTATAETCWKGTSSSLASLHPEVPWGAEPDSQALPWSGDWTDMACTAWDSGWRRATRSFR

SEQ ID NO: 26253 - protein, 80 aa, Synthetic construct
GLEGAKLGFCFPDLALQGDTPTATAETCWKGTSSSLASFPPEVPWGAEPDSQALPWSGDWTDMACTAWDSGWRRATRSFR

SEQ ID NO: 26254 - protein, 80 aa, Synthetic construct
GLEGAKLGFCFPDLALQGDTPTATAETCWKGTSSSLASFPQLVPWGAEPDSQALPWSGDWTDMACTAWDSGWRRATRSFR

SEQ ID NO: 26255 - protein, 80 aa, Synthetic construct
GLEGAKLGFCFPDLALQGDTPTATAETCWKGTSSSLASFPQLDWWGAEPDSQALPWSGDWTDMACTAWDSGWRRATRSFR

SEQ ID NO: 26256 - protein, 80 aa, Synthetic construct
GLEGAKLGFCFPDLALQGDTPTATAETCWKGTSSSLASFPQLDWGSAEPDSQALPWSGDWTDMACTAWDSGWRRATRSFR

SEQ ID NO: 26257 - protein, 80 aa, Synthetic construct
GLEGAKLGFCFPDLALQGDTPTATAETCWKGTSSSLASFPQLDWGSALPDSQALPWSGDWTDMACTAWDSGWRRATRSFR

SEQ ID NO: 26258 - protein, 80 aa, Synthetic construct
GLEGAKLGFCFPDLALQGDTPTATAETCWKGTSSSLASFPQLDWGSALLHSQALPWSGDWTDMACTAWDSGWRRATRSFR

SEQ ID NO: 26259 - protein, 80 aa, Synthetic construct
GLEGAKLGFCFPDLALQGDTPTATAETCWKGTSSSLASFPQLDWGSALLHPEALPWSGDWTDMACTAWDSGWRRATRSFR

SEQ ID NO: 26260 - protein, 80 aa, Synthetic construct
GLEGAKLGFCFPDLALQGDTPTATAETCWKGTSSSLASFPQLDWGSALLHPEVPPWSGDWTDMACTAWDSGWRRATRSFR

SEQ ID NO: 26261 - protein, 80 aa, Synthetic construct
GLEGAKLGFCFPDLALQGDTPTATAETCWKGTSSSLASFPQLDWGSALLHPEVPWGSGDWTDMACTAWDSGWRRATRSFR

SEQ ID NO: 26262 - protein, 80 aa, Synthetic construct
GLEGAKLGFCFPDLALQGDTPTATAETCWKGTSSSLASFPQLDWGSALLHPEVPWGAEDWTDMACTAWDSGWRRATRSFR

SEQ ID NO: 26263 - protein, 80 aa, Synthetic construct
GLEGAKLGFCFPDLALQGDTPTATAETCWKGTSSSLASFPQLDWGSALLHPEVPWGAEPDTDMACTAWDSGWRRATRSFR

SEQ ID NO: 26264 - protein, 80 aa, Synthetic construct
GLEGAKLGFCFPDLALQGDTPTATAETCWKGTSSSLASFPQLDWGSALLHPEVPWGAEPDSQMACTAWDSGWRRATRSFR

SEQ ID NO: 26265 - protein, 80 aa, Synthetic construct
GLEGAKLGFCFPDLALQGDTPTATAETCWKGTSSSLASFPQLDWGSALLHPEVPWGAEPDSQALCTAWDSGWRRATRSFR

SEQ ID NO: 26266 - protein, 80 aa, Synthetic construct
GLEGAKLGFCFPDLALQGDTPTATAETCWKGTSSSLASFPQLDWGSALLHPEVPWGAEPDSQALPWAWDSGWRRATRSFR

SEQ ID NO: 26267 - protein, 80 aa, Synthetic construct
GLEGAKLGFCFPDLALQGDTPTATAETCWKGTSSSLASFPQLDWGSALLHPEVPWGAEPDSQALPWSGDSGWRRATRSFR

SEQ ID NO: 26268 - protein, 80 aa, Synthetic construct
GLEGAKLGFCFPDLALQGDTPTATAETCWKGTSSSLASFPQLDWGSALLHPEVPWGAEPDSQALPWSGDWGWRRATRSFR

SEQ ID NO: 26269 - protein, 80 aa, Synthetic construct
PTATAETCWKGTSSSLASFPQLDWGSALLHPEVPWGAEPDSQALPWSGDWTDMACTAWDSWSGASQTLGPGWRRATRSFR

SEQ ID NO: 26270 - protein, 80 aa, Synthetic construct
FPATAETCWKGTSSSLASFPQLDWGSALLHPEVPWGAEPDSQALPWSGDWTDMACTAWDSWSGASQTLGPGWRRATRSFR

SEQ ID NO: 26271 - protein, 80 aa, Synthetic construct
FPDLALQGDTGTSSSLASFPQLDWGSALLHPEVPWGAEPDSQALPWSGDWTDMACTAWDSWSGASQTLGPGWRRATRSFR

SEQ ID NO: 26272 - protein, 80 aa, Synthetic construct
FPDLALQGDTPTSSSLASFPQLDWGSALLHPEVPWGAEPDSQALPWSGDWTDMACTAWDSWSGASQTLGPGWRRATRSFR

SEQ ID NO: 26273 - protein, 80 aa, Synthetic construct
FPDLALQGDTPTATSLASFPQLDWGSALLHPEVPWGAEPDSQALPWSGDWTDMACTAWDSWSGASQTLGPGWRRATRSFR

SEQ ID NO: 26274 - protein, 80 aa, Synthetic construct
FPDLALQGDTPTATAEASFPQLDWGSALLHPEVPWGAEPDSQALPWSGDWTDMACTAWDSWSGASQTLGPGWRRATRSFR

SEQ ID NO: 26275 - protein, 80 aa, Synthetic construct
FPDLALQGDTPTATAETCFPQLDWGSALLHPEVPWGAEPDSQALPWSGDWTDMACTAWDSWSGASQTLGPGWRRATRSFR

SEQ ID NO: 26276 - protein, 80 aa, Synthetic construct
FPDLALQGDTPTATAETCWKQLDWGSALLHPEVPWGAEPDSQALPWSGDWTDMACTAWDSWSGASQTLGPGWRRATRSFR

SEQ ID NO: 26277 - protein, 80 aa, Synthetic construct
FPDLALQGDTPTATAETCWKGTDWGSALLHPEVPWGAEPDSQALPWSGDWTDMACTAWDSWSGASQTLGPGWRRATRSFR

SEQ ID NO: 26278 - protein, 80 aa, Synthetic construct
FPDLALQGDTPTATAETCWKGTSSGSALLHPEVPWGAEPDSQALPWSGDWTDMACTAWDSWSGASQTLGPGWRRATRSFR

SEQ ID NO: 26279 - protein, 80 aa, Synthetic construct
FPDLALQGDTPTATAETCWKGTSSSLALLHPEVPWGAEPDSQALPWSGDWTDMACTAWDSWSGASQTLGPGWRRATRSFR

SEQ ID NO: 26280 - protein, 80 aa, Synthetic construct
FPDLALQGDTPTATAETCWKGTSSSLASLHPEVPWGAEPDSQALPWSGDWTDMACTAWDSWSGASQTLGPGWRRATRSFR

SEQ ID NO: 26281 - protein, 80 aa, Synthetic construct
FPDLALQGDTPTATAETCWKGTSSSLASFPPEVPWGAEPDSQALPWSGDWTDMACTAWDSWSGASQTLGPGWRRATRSFR

SEQ ID NO: 26282 - protein, 80 aa, Synthetic construct
FPDLALQGDTPTATAETCWKGTSSSLASFPQLVPWGAEPDSQALPWSGDWTDMACTAWDSWSGASQTLGPGWRRATRSFR

SEQ ID NO: 26283 - protein, 80 aa, Synthetic construct
FPDLALQGDTPTATAETCWKGTSSSLASFPQLDWWGAEPDSQALPWSGDWTDMACTAWDSWSGASQTLGPGWRRATRSFR

SEQ ID NO: 26284 - protein, 80 aa, Synthetic construct
FPDLALQGDTPTATAETCWKGTSSSLASFPQLDWGSAEPDSQALPWSGDWTDMACTAWDSWSGASQTLGPGWRRATRSFR

SEQ ID NO: 26285 - protein, 80 aa, Synthetic construct
FPDLALQGDTPTATAETCWKGTSSSLASFPQLDWGSALPDSQALPWSGDWTDMACTAWDSWSGASQTLGPGWRRATRSFR

SEQ ID NO: 26286 - protein, 80 aa, Synthetic construct
FPDLALQGDTPTATAETCWKGTSSSLASFPQLDWGSALLHSQALPWSGDWTDMACTAWDSWSGASQTLGPGWRRATRSFR

SEQ ID NO: 26287 - protein, 80 aa, Synthetic construct
FPDLALQGDTPTATAETCWKGTSSSLASFPQLDWGSALLHPEALPWSGDWTDMACTAWDSWSGASQTLGPGWRRATRSFR

SEQ ID NO: 26288 - protein, 80 aa, Synthetic construct
FPDLALQGDTPTATAETCWKGTSSSLASFPQLDWGSALLHPEVPPWSGDWTDMACTAWDSWSGASQTLGPGWRRATRSFR

SEQ ID NO: 26289 - protein, 80 aa, Synthetic construct
FPDLALQGDTPTATAETCWKGTSSSLASFPQLDWGSALLHPEVPWGSGDWTDMACTAWDSWSGASQTLGPGWRRATRSFR

SEQ ID NO: 26290 - protein, 80 aa, Synthetic construct
FPDLALQGDTPTATAETCWKGTSSSLASFPQLDWGSALLHPEVPWGAEDWTDMACTAWDSWSGASQTLGPGWRRATRSFR

SEQ ID NO: 26291 - protein, 80 aa, Synthetic construct
FPDLALQGDTPTATAETCWKGTSSSLASFPQLDWGSALLHPEVPWGAEPDTDMACTAWDSWSGASQTLGPGWRRATRSFR

SEQ ID NO: 26292 - protein, 80 aa, Synthetic construct
FPDLALQGDTPTATAETCWKGTSSSLASFPQLDWGSALLHPEVPWGAEPDSQMACTAWDSWSGASQTLGPGWRRATRSFR

SEQ ID NO: 26293 - protein, 80 aa, Synthetic construct
FPDLALQGDTPTATAETCWKGTSSSLASFPQLDWGSALLHPEVPWGAEPDSQALCTAWDSWSGASQTLGPGWRRATRSFR

SEQ ID NO: 26294 - protein, 80 aa, Synthetic construct
FPDLALQGDTPTATAETCWKGTSSSLASFPQLDWGSALLHPEVPWGAEPDSQALPWAWDSWSGASQTLGPGWRRATRSFR

SEQ ID NO: 26295 - protein, 80 aa, Synthetic construct
FPDLALQGDTPTATAETCWKGTSSSLASFPQLDWGSALLHPEVPWGAEPDSQALPWSGDSWSGASQTLGPGWRRATRSFR

SEQ ID NO: 26296 - protein, 80 aa, Synthetic construct
FPDLALQGDTPTATAETCWKGTSSSLASFPQLDWGSALLHPEVPWGAEPDSQALPWSGDWWSGASQTLGPGWRRATRSFR

SEQ ID NO: 26297 - protein, 80 aa, Synthetic construct
FPDLALQGDTPTATAETCWKGTSSSLASFPQLDWGSALLHPEVPWGAEPDSQALPWSGDWTDGASQTLGPGWRRATRSFR

SEQ ID NO: 26298 - protein, 80 aa, Synthetic construct
FPDLALQGDTPTATAETCWKGTSSSLASFPQLDWGSALLHPEVPWGAEPDSQALPWSGDWTDMASQTLGPGWRRATRSFR

SEQ ID NO: 26299 - protein, 80 aa, Synthetic construct
FPDLALQGDTPTATAETCWKGTSSSLASFPQLDWGSALLHPEVPWGAEPDSQALPWSGDWTDMACTTLGPGWRRATRSFR

SEQ ID NO: 26300 - protein, 80 aa, Synthetic construct
FPDLALQGDTPTATAETCWKGTSSSLASFPQLDWGSALLHPEVPWGAEPDSQALPWSGDWTDMACTAWGPGWRRATRSFR

SEQ ID NO: 26301 - protein, 80 aa, Synthetic construct
GTSSSLASFPQLDWGSALLHPEVPWGAEPDSQALPWSGDWTDMACTAWDSWSGASQTLGPAPLGPGPIPAGWRRATRSFR

SEQ ID NO: 26302 - protein, 80 aa, Synthetic construct
PTSSSLASFPQLDWGSALLHPEVPWGAEPDSQALPWSGDWTDMACTAWDSWSGASQTLGPAPLGPGPIPAGWRRATRSFR

SEQ ID NO: 26303 - protein, 80 aa, Synthetic construct
PTATSLASFPQLDWGSALLHPEVPWGAEPDSQALPWSGDWTDMACTAWDSWSGASQTLGPAPLGPGPIPAGWRRATRSFR

SEQ ID NO: 26304 - protein, 80 aa, Synthetic construct
PTATAEASFPQLDWGSALLHPEVPWGAEPDSQALPWSGDWTDMACTAWDSWSGASQTLGPAPLGPGPIPAGWRRATRSFR

SEQ ID NO: 26305 - protein, 80 aa, Synthetic construct
PTATAETCFPQLDWGSALLHPEVPWGAEPDSQALPWSGDWTDMACTAWDSWSGASQTLGPAPLGPGPIPAGWRRATRSFR

SEQ ID NO: 26306 - protein, 80 aa, Synthetic construct
PTATAETCWKQLDWGSALLHPEVPWGAEPDSQALPWSGDWTDMACTAWDSWSGASQTLGPAPLGPGPIPAGWRRATRSFR

SEQ ID NO: 26307 - protein, 80 aa, Synthetic construct
PTATAETCWKGTDWGSALLHPEVPWGAEPDSQALPWSGDWTDMACTAWDSWSGASQTLGPAPLGPGPIPAGWRRATRSFR

SEQ ID NO: 26308 - protein, 80 aa, Synthetic construct
PTATAETCWKGTSSGSALLHPEVPWGAEPDSQALPWSGDWTDMACTAWDSWSGASQTLGPAPLGPGPIPAGWRRATRSFR

SEQ ID NO: 26309 - protein, 80 aa, Synthetic construct
PTATAETCWKGTSSSLALLHPEVPWGAEPDSQALPWSGDWTDMACTAWDSWSGASQTLGPAPLGPGPIPAGWRRATRSFR

SEQ ID NO: 26310 - protein, 80 aa, Synthetic construct
PTATAETCWKGTSSSLASLHPEVPWGAEPDSQALPWSGDWTDMACTAWDSWSGASQTLGPAPLGPGPIPAGWRRATRSFR

SEQ ID NO: 26311 - protein, 80 aa, Synthetic construct
PTATAETCWKGTSSSLASFPPEVPWGAEPDSQALPWSGDWTDMACTAWDSWSGASQTLGPAPLGPGPIPAGWRRATRSFR

SEQ ID NO: 26312 - protein, 80 aa, Synthetic construct
PTATAETCWKGTSSSLASFPQLVPWGAEPDSQALPWSGDWTDMACTAWDSWSGASQTLGPAPLGPGPIPAGWRRATRSFR

SEQ ID NO: 26313 - protein, 80 aa, Synthetic construct
PTATAETCWKGTSSSLASFPQLDWWGAEPDSQALPWSGDWTDMACTAWDSWSGASQTLGPAPLGPGPIPAGWRRATRSFR

SEQ ID NO: 26314 - protein, 80 aa, Synthetic construct
PTATAETCWKGTSSSLASFPQLDWGSAEPDSQALPWSGDWTDMACTAWDSWSGASQTLGPAPLGPGPIPAGWRRATRSFR

SEQ ID NO: 26315 - protein, 80 aa, Synthetic construct
PTATAETCWKGTSSSLASFPQLDWGSALPDSQALPWSGDWTDMACTAWDSWSGASQTLGPAPLGPGPIPAGWRRATRSFR

SEQ ID NO: 26316 - protein, 80 aa, Synthetic construct
PTATAETCWKGTSSSLASFPQLDWGSALLHSQALPWSGDWTDMACTAWDSWSGASQTLGPAPLGPGPIPAGWRRATRSFR

SEQ ID NO: 26317 - protein, 80 aa, Synthetic construct
PTATAETCWKGTSSSLASFPQLDWGSALLHPEALPWSGDWTDMACTAWDSWSGASQTLGPAPLGPGPIPAGWRRATRSFR

SEQ ID NO: 26318 - protein, 80 aa, Synthetic construct
PTATAETCWKGTSSSLASFPQLDWGSALLHPEVPPWSGDWTDMACTAWDSWSGASQTLGPAPLGPGPIPAGWRRATRSFR

SEQ ID NO: 26319 - protein, 80 aa, Synthetic construct
PTATAETCWKGTSSSLASFPQLDWGSALLHPEVPWGSGDWTDMACTAWDSWSGASQTLGPAPLGPGPIPAGWRRATRSFR

SEQ ID NO: 26320 - protein, 80 aa, Synthetic construct
PTATAETCWKGTSSSLASFPQLDWGSALLHPEVPWGAEDWTDMACTAWDSWSGASQTLGPAPLGPGPIPAGWRRATRSFR

SEQ ID NO: 26321 - protein, 80 aa, Synthetic construct
PTATAETCWKGTSSSLASFPQLDWGSALLHPEVPWGAEPDTDMACTAWDSWSGASQTLGPAPLGPGPIPAGWRRATRSFR

SEQ ID NO: 26322 - protein, 80 aa, Synthetic construct
PTATAETCWKGTSSSLASFPQLDWGSALLHPEVPWGAEPDSQMACTAWDSWSGASQTLGPAPLGPGPIPAGWRRATRSFR

SEQ ID NO: 26323 - protein, 80 aa, Synthetic construct
PTATAETCWKGTSSSLASFPQLDWGSALLHPEVPWGAEPDSQALCTAWDSWSGASQTLGPAPLGPGPIPAGWRRATRSFR

SEQ ID NO: 26324 - protein, 80 aa, Synthetic construct
PTATAETCWKGTSSSLASFPQLDWGSALLHPEVPWGAEPDSQALPWAWDSWSGASQTLGPAPLGPGPIPAGWRRATRSFR

SEQ ID NO: 26325 - protein, 80 aa, Synthetic construct
PTATAETCWKGTSSSLASFPQLDWGSALLHPEVPWGAEPDSQALPWSGDSWSGASQTLGPAPLGPGPIPAGWRRATRSFR

SEQ ID NO: 26326 - protein, 80 aa, Synthetic construct
PTATAETCWKGTSSSLASFPQLDWGSALLHPEVPWGAEPDSQALPWSGDWWSGASQTLGPAPLGPGPIPAGWRRATRSFR

SEQ ID NO: 26327 - protein, 80 aa, Synthetic construct
PTATAETCWKGTSSSLASFPQLDWGSALLHPEVPWGAEPDSQALPWSGDWTDGASQTLGPAPLGPGPIPAGWRRATRSFR

SEQ ID NO: 26328 - protein, 80 aa, Synthetic construct
PTATAETCWKGTSSSLASFPQLDWGSALLHPEVPWGAEPDSQALPWSGDWTDMASQTLGPAPLGPGPIPAGWRRATRSFR

SEQ ID NO: 26329 - protein, 80 aa, Synthetic construct
PTATAETCWKGTSSSLASFPQLDWGSALLHPEVPWGAEPDSQALPWSGDWTDMACTTLGPAPLGPGPIPAGWRRATRSFR

SEQ ID NO: 26330 - protein, 80 aa, Synthetic construct
PTATAETCWKGTSSSLASFPQLDWGSALLHPEVPWGAEPDSQALPWSGDWTDMACTAWGPAPLGPGPIPAGWRRATRSFR

SEQ ID NO: 26331 - protein, 80 aa, Synthetic construct
PTATAETCWKGTSSSLASFPQLDWGSALLHPEVPWGAEPDSQALPWSGDWTDMACTAWDSAPLGPGPIPAGWRRATRSFR

SEQ ID NO: 26332 - protein, 80 aa, Synthetic construct
PTATAETCWKGTSSSLASFPQLDWGSALLHPEVPWGAEPDSQALPWSGDWTDMACTAWDSWSLGPGPIPAGWRRATRSFR

SEQ ID NO: 26333 - protein, 80 aa, Synthetic construct
PTATAETCWKGTSSSLASFPQLDWGSALLHPEVPWGAEPDSQALPWSGDWTDMACTAWDSWSGAPGPIPAGWRRATRSFR

SEQ ID NO: 26334 - protein, 80 aa, Synthetic construct
PTATAETCWKGTSSSLASFPQLDWGSALLHPEVPWGAEPDSQALPWSGDWTDMACTAWDSWSGASQPIPAGWRRATRSFR

SEQ ID NO: 26335 - protein, 80 aa, Synthetic construct
PTATAETCWKGTSSSLASFPQLDWGSALLHPEVPWGAEPDSQALPWSGDWTDMACTAWDSWSGASQTLPAGWRRATRSFR

SEQ ID NO: 26336 - protein, 80 aa, Synthetic construct
SPPPGGGGDGPWGAEPGWVDPLTWLSFQGPPGGPGIGPGVGPGSEVWGIPPCPPPYELCGGMAYCGPQVGGWRRATRSFR

SEQ ID NO: 26337 - protein, 80 aa, Synthetic construct
AGPPGGGGDGPWGAEPGWVDPLTWLSFQGPPGGPGIGPGVGPGSEVWGIPPCPPPYELCGGMAYCGPQVGGWRRATRSFR

SEQ ID NO: 26338 - protein, 80 aa, Synthetic construct
AGHLGGGGDGPWGAEPGWVDPLTWLSFQGPPGGPGIGPGVGPGSEVWGIPPCPPPYELCGGMAYCGPQVGGWRRATRSFR

SEQ ID NO: 26339 - protein, 80 aa, Synthetic construct
AGHLASGGDGPWGAEPGWVDPLTWLSFQGPPGGPGIGPGVGPGSEVWGIPPCPPPYELCGGMAYCGPQVGGWRRATRSFR

SEQ ID NO: 26340 - protein, 80 aa, Synthetic construct
AGHLASDFDGPWGAEPGWVDPLTWLSFQGPPGGPGIGPGVGPGSEVWGIPPCPPPYELCGGMAYCGPQVGGWRRATRSFR

SEQ ID NO: 26341 - protein, 80 aa, Synthetic construct
AGHLASDFAFSPGAEPGWVDPLTWLSFQGPPGGPGIGPGVGPGSEVWGIPPCPPPYELCGGMAYCGPQVGGWRRATRSFR

SEQ ID NO: 26342 - protein, 80 aa, Synthetic construct
AGHLASDFAFSPPPEPGWVDPLTWLSFQGPPGGPGIGPGVGPGSEVWGIPPCPPPYELCGGMAYCGPQVGGWRRATRSFR

SEQ ID NO: 26343 - protein, 80 aa, Synthetic construct
AGHLASDFAFSPPPGGGWVDPLTWLSFQGPPGGPGIGPGVGPGSEVWGIPPCPPPYELCGGMAYCGPQVGGWRRATRSFR

SEQ ID NO: 26344 - protein, 80 aa, Synthetic construct
AGHLASDFAFSPPPGGGGVDPLTWLSFQGPPGGPGIGPGVGPGSEVWGIPPCPPPYELCGGMAYCGPQVGGWRRATRSFR

SEQ ID NO: 26345 - protein, 80 aa, Synthetic construct
AGHLASDFAFSPPPGGGGDGPLTWLSFQGPPGGPGIGPGVGPGSEVWGIPPCPPPYELCGGMAYCGPQVGGWRRATRSFR

SEQ ID NO: 26346 - protein, 80 aa, Synthetic construct
AGHLASDFAFSPPPGGGGDGPWTWLSFQGPPGGPGIGPGVGPGSEVWGIPPCPPPYELCGGMAYCGPQVGGWRRATRSFR

SEQ ID NO: 26347 - protein, 80 aa, Synthetic construct
AGHLASDFAFSPPPGGGGDGPWGAEPGWVDPLGPGIGPGVGPGSEVWGIPPCPPPYELCGGMAYCGPQVGGWRRATRSFR

SEQ ID NO: 26348 - protein, 80 aa, Synthetic construct
AGHLASDFAFSPPPGGGGDGPWGAEPGWVDPLTWGIGPGVGPGSEVWGIPPCPPPYELCGGMAYCGPQVGGWRRATRSFR

SEQ ID NO: 26349 - protein, 80 aa, Synthetic construct
AGHLASDFAFSPPPGGGGDGPWGAEPGWVDPLTWLSGPGVGPGSEVWGIPPCPPPYELCGGMAYCGPQVGGWRRATRSFR

SEQ ID NO: 26350 - protein, 80 aa, Synthetic construct
AGHLASDFAFSPPPGGGGDGPWGAEPGWVDPLTWLSFQGPGPGSEVWGIPPCPPPYELCGGMAYCGPQVGGWRRATRSFR

SEQ ID NO: 26351 - protein, 80 aa, Synthetic construct
AGHLASDFAFSPPPGGGGDGPWGAEPGWVDPLTWLSFQGPPGGPGIGPIPPCPPPYELCGGMAYCGPQVGGWRRATRSFR

SEQ ID NO: 26352 - protein, 80 aa, Synthetic construct
AGHLASDFAFSPPPGGGGDGPWGAEPGWVDPLTWLSFQGPPGGPGIGPGVPCPPPYELCGGMAYCGPQVGGWRRATRSFR

SEQ ID NO: 26353 - protein, 80 aa, Synthetic construct
AGHLASDFAFSPPPGGGGDGPWGAEPGWVDPLTWLSFQGPPGGPGIGPGVGPPPPYELCGGMAYCGPQVGGWRRATRSFR

SEQ ID NO: 26354 - protein, 80 aa, Synthetic construct
AGHLASDFAFSPPPGGGGDGPWGAEPGWVDPLTWLSFQGPPGGPGIGPGVGPGSPYELCGGMAYCGPQVGGWRRATRSFR

SEQ ID NO: 26355 - protein, 80 aa, Synthetic construct
AGHLASDFAFSPPPGGGGDGPWGAEPGWVDPLTWLSFQGPPGGPGIGPGVGPGSEVELCGGMAYCGPQVGGWRRATRSFR

SEQ ID NO: 26356 - protein, 80 aa, Synthetic construct
AGHLASDFAFSPPPGGGGDGPWGAEPGWVDPLTWLSFQGPPGGPGIGPGVGPGSEVWGCGGMAYCGPQVGGWRRATRSFR

SEQ ID NO: 26357 - protein, 80 aa, Synthetic construct
AGHLASDFAFSPPPGGGGDGPWGAEPGWVDPLTWLSFQGPPGGPGIGPGVGPGSEVWGIPGMAYCGPQVGGWRRATRSFR

SEQ ID NO: 26358 - protein, 80 aa, Synthetic construct
AGHLASDFAFSPPPGGGGDGPWGAEPGWVDPLTWLSFQGPPGGPGIGPGVGPGSEVWGIPPCAYCGPQVGGWRRATRSFR

SEQ ID NO: 26359 - protein, 80 aa, Synthetic construct
AGHLASDFAFSPPPGGGGDGPWGAEPGWVDPLTWLSFQGPPGGPGIGPGVGPGSEVWGIPPCPPCGPQVGGWRRATRSFR

SEQ ID NO: 26360 - protein, 80 aa, Synthetic construct
AGHLASDFAFSPPPGGGGDGPWGAEPGWVDPLTWLSFQGPPGGPGIGPGVGPGSEVWGIPPCPPPYPQVGGWRRATRSFR

SEQ ID NO: 26361 - protein, 80 aa, Synthetic construct
AGHLASDFAFSPPPGGGGDGPWGAEPGWVDPLTWLSFQGPPGGPGIGPGVGPGSEVWGIPPCPPPYELVGGWRRATRSFR

SEQ ID NO: 26362 - protein, 80 aa, Synthetic construct
AGHLASDFAFSPPPGGGGDGPWGAEPGWVDPLTWLSFQGPPGGPGIGPGVGPGSEVWGIPPCPPPYELCGGWRRATRSFR

SEQ ID NO: 26363 - protein, 80 aa, Synthetic construct
PWGAEPGWVDPLTWGIGPGVGPGSEVWGIPPCPPPYELCGGMAYCGPQVGVGLVPQGGLETSQPESEAGVGWRRATRSFR

SEQ ID NO: 26364 - protein, 80 aa, Synthetic construct
PWGAEPGWVDPLTWLSGPGVGPGSEVWGIPPCPPPYELCGGMAYCGPQVGVGLVPQGGLETSQPESEAGVGWRRATRSFR

SEQ ID NO: 26365 - protein, 80 aa, Synthetic construct
PWGAEPGWVDPLTWLSFQGVGPGSEVWGIPPCPPPYELCGGMAYCGPQVGVGLVPQGGLETSQPESEAGVGWRRATRSFR

SEQ ID NO: 26366 - protein, 80 aa, Synthetic construct
PWGAEPGWVDPLTWLSFQGPGPGSEVWGIPPCPPPYELCGGMAYCGPQVGVGLVPQGGLETSQPESEAGVGWRRATRSFR

SEQ ID NO: 26367 - protein, 80 aa, Synthetic construct
PWGAEPGWVDPLTWLSFQGPPGGSEVWGIPPCPPPYELCGGMAYCGPQVGVGLVPQGGLETSQPESEAGVGWRRATRSFR

SEQ ID NO: 26368 - protein, 80 aa, Synthetic construct
PWGAEPGWVDPLTWLSFQGPPGGPEVWGIPPCPPPYELCGGMAYCGPQVGVGLVPQGGLETSQPESEAGVGWRRATRSFR

SEQ ID NO: 26369 - protein, 80 aa, Synthetic construct
PWGAEPGWVDPLTWLSFQGPPGGPGIGPIPPCPPPYELCGGMAYCGPQVGVGLVPQGGLETSQPESEAGVGWRRATRSFR

SEQ ID NO: 26370 - protein, 80 aa, Synthetic construct
PWGAEPGWVDPLTWLSFQGPPGGPGIGPGVPCPPPYELCGGMAYCGPQVGVGLVPQGGLETSQPESEAGVGWRRATRSFR

SEQ ID NO: 26371 - protein, 80 aa, Synthetic construct
PWGAEPGWVDPLTWLSFQGPPGGPGIGPGVGPPPPYELCGGMAYCGPQVGVGLVPQGGLETSQPESEAGVGWRRATRSFR

SEQ ID NO: 26372 - protein, 80 aa, Synthetic construct
PWGAEPGWVDPLTWLSFQGPPGGPGIGPGVGPGSPYELCGGMAYCGPQVGVGLVPQGGLETSQPESEAGVGWRRATRSFR

SEQ ID NO: 26373 - protein, 80 aa, Synthetic construct
PWGAEPGWVDPLTWLSFQGPPGGPGIGPGVGPGSEVELCGGMAYCGPQVGVGLVPQGGLETSQPESEAGVGWRRATRSFR

SEQ ID NO: 26374 - protein, 80 aa, Synthetic construct
PWGAEPGWVDPLTWLSFQGPPGGPGIGPGVGPGSEVWGCGGMAYCGPQVGVGLVPQGGLETSQPESEAGVGWRRATRSFR

SEQ ID NO: 26375 - protein, 80 aa, Synthetic construct
PWGAEPGWVDPLTWLSFQGPPGGPGIGPGVGPGSEVWGIPGMAYCGPQVGVGLVPQGGLETSQPESEAGVGWRRATRSFR

SEQ ID NO: 26376 - protein, 80 aa, Synthetic construct
PWGAEPGWVDPLTWLSFQGPPGGPGIGPGVGPGSEVWGIPPCAYCGPQVGVGLVPQGGLETSQPESEAGVGWRRATRSFR

SEQ ID NO: 26377 - protein, 80 aa, Synthetic construct
PWGAEPGWVDPLTWLSFQGPPGGPGIGPGVGPGSEVWGIPPCPPCGPQVGVGLVPQGGLETSQPESEAGVGWRRATRSFR

SEQ ID NO: 26378 - protein, 80 aa, Synthetic construct
PWGAEPGWVDPLTWLSFQGPPGGPGIGPGVGPGSEVWGIPPCPPPYPQVGVGLVPQGGLETSQPESEAGVGWRRATRSFR

SEQ ID NO: 26379 - protein, 80 aa, Synthetic construct
PWGAEPGWVDPLTWLSFQGPPGGPGIGPGVGPGSEVWGIPPCPPPYELVGVGLVPQGGLETSQPESEAGVGWRRATRSFR

SEQ ID NO: 26380 - protein, 80 aa, Synthetic construct
PWGAEPGWVDPLTWLSFQGPPGGPGIGPGVGPGSEVWGIPPCPPPYELCGVGLVPQGGLETSQPESEAGVGWRRATRSFR

SEQ ID NO: 26381 - protein, 80 aa, Synthetic construct
PWGAEPGWVDPLTWLSFQGPPGGPGIGPGVGPGSEVWGIPPCPPPYELCGGMLVPQGGLETSQPESEAGVGWRRATRSFR

SEQ ID NO: 26382 - protein, 80 aa, Synthetic construct
PWGAEPGWVDPLTWLSFQGPPGGPGIGPGVGPGSEVWGIPPCPPPYELCGGMAYPQGGLETSQPESEAGVGWRRATRSFR

SEQ ID NO: 26383 - protein, 80 aa, Synthetic construct
PWGAEPGWVDPLTWLSFQGPPGGPGIGPGVGPGSEVWGIPPCPPPYELCGGMAYCGGGLETSQPESEAGVGWRRATRSFR

SEQ ID NO: 26384 - protein, 80 aa, Synthetic construct
PWGAEPGWVDPLTWLSFQGPPGGPGIGPGVGPGSEVWGIPPCPPPYELCGGMAYCGPQLETSQPESEAGVGWRRATRSFR

SEQ ID NO: 26385 - protein, 80 aa, Synthetic construct
PWGAEPGWVDPLTWLSFQGPPGGPGIGPGVGPGSEVWGIPPCPPPYELCGGMAYCGPQVGTSQPESEAGVGWRRATRSFR

SEQ ID NO: 26386 - protein, 80 aa, Synthetic construct
PWGAEPGWVDPLTWLSFQGPPGGPGIGPGVGPGSEVWGIPPCPPPYELCGGMAYCGPQVGVGQPESEAGVGWRRATRSFR

SEQ ID NO: 26387 - protein, 80 aa, Synthetic construct
PWGAEPGWVDPLTWLSFQGPPGGPGIGPGVGPGSEVWGIPPCPPPYELCGGMAYCGPQVGVGLVESEAGVGWRRATRSFR

SEQ ID NO: 26388 - protein, 80 aa, Synthetic construct
PWGAEPGWVDPLTWLSFQGPPGGPGIGPGVGPGSEVWGIPPCPPPYELCGGMAYCGPQVGVGLVPQEAGVGWRRATRSFR

SEQ ID NO: 26389 - protein, 80 aa, Synthetic construct
PWGAEPGWVDPLTWLSFQGPPGGPGIGPGVGPGSEVWGIPPCPPPYELCGGMAYCGPQVGVGLVPQGGGVGWRRATRSFR

SEQ ID NO: 26390 - protein, 80 aa, Synthetic construct
PWGAEPGWVDPLTWLSFQGPPGGPGIGPGVGPGSEVWGIPPCPPPYELCGGMAYCGPQVGVGLVPQGGLEGWRRATRSFR

SEQ ID NO: 26391 - protein, 80 aa, Synthetic construct
SENLFGVLTEQVAGPLGQNLEVEPYSQYSNVQFPQVQPQISSSSYYSNLGFYPQQPEEWYSPGIYELRRMGWRRATRSFR

SEQ ID NO: 26392 - protein, 80 aa, Synthetic construct
HLNLFGVLTEQVAGPLGQNLEVEPYSQYSNVQFPQVQPQISSSSYYSNLGFYPQQPEEWYSPGIYELRRMGWRRATRSFR

SEQ ID NO: 26393 - protein, 80 aa, Synthetic construct
HLPTFGVLTEQVAGPLGQNLEVEPYSQYSNVQFPQVQPQISSSSYYSNLGFYPQQPEEWYSPGIYELRRMGWRRATRSFR

SEQ ID NO: 26394 - protein, 80 aa, Synthetic construct
HLPTTDVLTEQVAGPLGQNLEVEPYSQYSNVQFPQVQPQISSSSYYSNLGFYPQQPEEWYSPGIYELRRMGWRRATRSFR

SEQ ID NO: 26395 - protein, 80 aa, Synthetic construct
HLPTTDEFTEQVAGPLGQNLEVEPYSQYSNVQFPQVQPQISSSSYYSNLGFYPQQPEEWYSPGIYELRRMGWRRATRSFR

SEQ ID NO: 26396 - protein, 80 aa, Synthetic construct
HLPTTDEFSFQVAGPLGQNLEVEPYSQYSNVQFPQVQPQISSSSYYSNLGFYPQQPEEWYSPGIYELRRMGWRRATRSFR

SEQ ID NO: 26397 - protein, 80 aa, Synthetic construct
HLPTTDEFSFSEAGPLGQNLEVEPYSQYSNVQFPQVQPQISSSSYYSNLGFYPQQPEEWYSPGIYELRRMGWRRATRSFR

SEQ ID NO: 26398 - protein, 80 aa, Synthetic construct
HLPTTDEFSFSENLPLGQNLEVEPYSQYSNVQFPQVQPQISSSSYYSNLGFYPQQPEEWYSPGIYELRRMGWRRATRSFR

SEQ ID NO: 26399 - protein, 80 aa, Synthetic construct
HLPTTDEFSFSENLFGGQNLEVEPYSQYSNVQFPQVQPQISSSSYYSNLGFYPQQPEEWYSPGIYELRRMGWRRATRSFR

SEQ ID NO: 26400 - protein, 80 aa, Synthetic construct
HLPTTDEFSFSENLFGVLTEEVEPYSQYSNVQFPQVQPQISSSSYYSNLGFYPQQPEEWYSPGIYELRRMGWRRATRSFR

SEQ ID NO: 26401 - protein, 80 aa, Synthetic construct
HLPTTDEFSFSENLFGVLTEQVEPYSQYSNVQFPQVQPQISSSSYYSNLGFYPQQPEEWYSPGIYELRRMGWRRATRSFR

SEQ ID NO: 26402 - protein, 80 aa, Synthetic construct
HLPTTDEFSFSENLFGVLTEQVAGYSQYSNVQFPQVQPQISSSSYYSNLGFYPQQPEEWYSPGIYELRRMGWRRATRSFR

SEQ ID NO: 26403 - protein, 80 aa, Synthetic construct
HLPTTDEFSFSENLFGVLTEQVAGPLQYSNVQFPQVQPQISSSSYYSNLGFYPQQPEEWYSPGIYELRRMGWRRATRSFR

SEQ ID NO: 26404 - protein, 80 aa, Synthetic construct
HLPTTDEFSFSENLFGVLTEQVAGPLGQSNVQFPQVQPQISSSSYYSNLGFYPQQPEEWYSPGIYELRRMGWRRATRSFR

SEQ ID NO: 26405 - protein, 80 aa, Synthetic construct
HLPTTDEFSFSENLFGVLTEQVAGPLGQNLVQFPQVQPQISSSSYYSNLGFYPQQPEEWYSPGIYELRRMGWRRATRSFR

SEQ ID NO: 26406 - protein, 80 aa, Synthetic construct
HLPTTDEFSFSENLFGVLTEQVAGPLGQNLEVFPQVQPQISSSSYYSNLGFYPQQPEEWYSPGIYELRRMGWRRATRSFR

SEQ ID NO: 26407 - protein, 80 aa, Synthetic construct
HLPTTDEFSFSENLFGVLTEQVAGPLGQNLEVEPQVQPQISSSSYYSNLGFYPQQPEEWYSPGIYELRRMGWRRATRSFR

SEQ ID NO: 26408 - protein, 80 aa, Synthetic construct
HLPTTDEFSFSENLFGVLTEQVAGPLGQNLEVEPYSQPQISSSSYYSNLGFYPQQPEEWYSPGIYELRRMGWRRATRSFR

SEQ ID NO: 26409 - protein, 80 aa, Synthetic construct
HLPTTDEFSFSENLFGVLTEQVAGPLGQNLEVEPYSQYQISSSSYYSNLGFYPQQPEEWYSPGIYELRRMGWRRATRSFR

SEQ ID NO: 26410 - protein, 80 aa, Synthetic construct
HLPTTDEFSFSENLFGVLTEQVAGPLGQNLEVEPYSQYSNSSSSYYSNLGFYPQQPEEWYSPGIYELRRMGWRRATRSFR

SEQ ID NO: 26411 - protein, 80 aa, Synthetic construct
HLPTTDEFSFSENLFGVLTEQVAGPLGQNLEVEPYSQYSNVQSSYYSNLGFYPQQPEEWYSPGIYELRRMGWRRATRSFR

SEQ ID NO: 26412 - protein, 80 aa, Synthetic construct
HLPTTDEFSFSENLFGVLTEQVAGPLGQNLEVEPYSQYSNVQFPQVSNLGFYPQQPEEWYSPGIYELRRMGWRRATRSFR

SEQ ID NO: 26413 - protein, 80 aa, Synthetic construct
HLPTTDEFSFSENLFGVLTEQVAGPLGQNLEVEPYSQYSNVQFPQVQPLGFYPQQPEEWYSPGIYELRRMGWRRATRSFR

SEQ ID NO: 26414 - protein, 80 aa, Synthetic construct
HLPTTDEFSFSENLFGVLTEQVAGPLGQNLEVEPYSQYSNVQFPQVQPQIFYPQQPEEWYSPGIYELRRMGWRRATRSFR

SEQ ID NO: 26415 - protein, 80 aa, Synthetic construct
HLPTTDEFSFSENLFGVLTEQVAGPLGQNLEVEPYSQYSNVQFPQVQPQISSPQQPEEWYSPGIYELRRMGWRRATRSFR

SEQ ID NO: 26416 - protein, 80 aa, Synthetic construct
HLPTTDEFSFSENLFGVLTEQVAGPLGQNLEVEPYSQYSNVQFPQVQPQISSSSQPEEWYSPGIYELRRMGWRRATRSFR

SEQ ID NO: 26417 - protein, 80 aa, Synthetic construct
HLPTTDEFSFSENLFGVLTEQVAGPLGQNLEVEPYSQYSNVQFPQVQPQISSSSYYEEWYSPGIYELRRMGWRRATRSFR

SEQ ID NO: 26418 - protein, 80 aa, Synthetic construct
HLPTTDEFSFSENLFGVLTEQVAGPLGQNLEVEPYSQYSNVQFPQVQPQISSSSYYSNWYSPGIYELRRMGWRRATRSFR

SEQ ID NO: 26419 - protein, 80 aa, Synthetic construct
HLPTTDEFSFSENLFGVLTEQVAGPLGQNLEVEPYSQYSNVQFPQVQPQISSSSYYSNLGSPGIYELRRMGWRRATRSFR

SEQ ID NO: 26420 - protein, 80 aa, Synthetic construct
HLPTTDEFSFSENLFGVLTEQVAGPLGQNLEVEPYSQYSNVQFPQVQPQISSSSYYSNLGFYPQYELRRMGWRRATRSFR

SEQ ID NO: 26421 - protein, 80 aa, Synthetic construct
HLPTTDEFSFSENLFGVLTEQVAGPLGQNLEVEPYSQYSNVQFPQVQPQISSSSYYSNLGFYPQQPLRRMGWRRATRSFR

SEQ ID NO: 26422 - protein, 80 aa, Synthetic construct
HLPTTDEFSFSENLFGVLTEQVAGPLGQNLEVEPYSQYSNVQFPQVQPQISSSSYYSNLGFYPQQPEERMGWRRATRSFR

SEQ ID NO: 26423 - protein, 80 aa, Synthetic construct
HLPTTDEFSFSENLFGVLTEQVAGPLGQNLEVEPYSQYSNVQFPQVQPQISSSSYYSNLGFYPQQPEEWYGWRRATRSFR

SEQ ID NO: 26424 - protein, 80 aa, Synthetic construct
TCVEQDKLGQAFEDAFEVLRQHSTNYLALINHRPHVKGNSSCYGVLPTEEPVYNWRTVINSAADFYFEGNGWRRATRSFR

SEQ ID NO: 26425 - protein, 80 aa, Synthetic construct
TCVEQDKLGQAFEDAFEVLRQHSTGDLALINHRPHVKGNSSCYGVLPTEEPVYNWRTVINSAADFYFEGNGWRRATRSFR

SEQ ID NO: 26426 - protein, 80 aa, Synthetic construct
TCVEQDKLGQAFEDAFEVLRQHSTGDLQLINHRPHVKGNSSCYGVLPTEEPVYNWRTVINSAADFYFEGNGWRRATRSFR

SEQ ID NO: 26427 - protein, 80 aa, Synthetic construct
TCVEQDKLGQAFEDAFEVLRQHSTGDLQYSNHRPHVKGNSSCYGVLPTEEPVYNWRTVINSAADFYFEGNGWRRATRSFR

SEQ ID NO: 26428 - protein, 80 aa, Synthetic construct
TCVEQDKLGQAFEDAFEVLRQHSTGDLQYSPDRPHVKGNSSCYGVLPTEEPVYNWRTVINSAADFYFEGNGWRRATRSFR

SEQ ID NO: 26429 - protein, 80 aa, Synthetic construct
TCVEQDKLGQAFEDAFEVLRQHSTGDLQYSPDYRHVKGNSSCYGVLPTEEPVYNWRTVINSAADFYFEGNGWRRATRSFR

SEQ ID NO: 26430 - protein, 80 aa, Synthetic construct
TCVEQDKLGQAFEDAFEVLRQHSTGDLQYSPDYRNYKGNSSCYGVLPTEEPVYNWRTVINSAADFYFEGNGWRRATRSFR

SEQ ID NO: 26431 - protein, 80 aa, Synthetic construct
TCVEQDKLGQAFEDAFEVLRQHSTGDLQYSPDYRNYLALINHRPVLPTEEPVYNWRTVINSAADFYFEGNGWRRATRSFR

SEQ ID NO: 26432 - protein, 80 aa, Synthetic construct
TCVEQDKLGQAFEDAFEVLRQHSTGDLQYSPDYRNYLALINHRPHVPTEEPVYNWRTVINSAADFYFEGNGWRRATRSFR

SEQ ID NO: 26433 - protein, 80 aa, Synthetic construct
TCVEQDKLGQAFEDAFEVLRQHSTGDLQYSPDYRNYLALINHRPHVKGEEPVYNWRTVINSAADFYFEGNGWRRATRSFR

SEQ ID NO: 26434 - protein, 80 aa, Synthetic construct
TCVEQDKLGQAFEDAFEVLRQHSTGDLQYSPDYRNYLALINHRPHVKGNSSCYNWRTVINSAADFYFEGNGWRRATRSFR

SEQ ID NO: 26435 - protein, 80 aa, Synthetic construct
TCVEQDKLGQAFEDAFEVLRQHSTGDLQYSPDYRNYLALINHRPHVKGNSSCYGWRTVINSAADFYFEGNGWRRATRSFR

SEQ ID NO: 26436 - protein, 80 aa, Synthetic construct
TCVEQDKLGQAFEDAFEVLRQHSTGDLQYSPDYRNYLALINHRPHVKGNSSCYGVLPTINSAADFYFEGNGWRRATRSFR

SEQ ID NO: 26437 - protein, 80 aa, Synthetic construct
TCVEQDKLGQAFEDAFEVLRQHSTGDLQYSPDYRNYLALINHRPHVKGNSSCYGVLPTEESAADFYFEGNGWRRATRSFR

SEQ ID NO: 26438 - protein, 80 aa, Synthetic construct
TCVEQDKLGQAFEDAFEVLRQHSTGDLQYSPDYRNYLALINHRPHVKGNSSCYGVLPTEEPVADFYFEGNGWRRATRSFR

SEQ ID NO: 26439 - protein, 80 aa, Synthetic construct
TCVEQDKLGQAFEDAFEVLRQHSTGDLQYSPDYRNYLALINHRPHVKGNSSCYGVLPTEEPVYNFYFEGNGWRRATRSFR

SEQ ID NO: 26440 - protein, 80 aa, Synthetic construct
TCVEQDKLGQAFEDAFEVLRQHSTGDLQYSPDYRNYLALINHRPHVKGNSSCYGVLPTEEPVYNWRFEGNGWRRATRSFR

SEQ ID NO: 26441 - protein, 80 aa, Synthetic construct
TCVEQDKLGQAFEDAFEVLRQHSTGDLQYSPDYRNYLALINHRPHVKGNSSCYGVLPTEEPVYNWRTVGNGWRRATRSFR

SEQ ID NO: 26442 - protein, 80 aa, Synthetic construct
TCVEQDKLGQAFEDAFEVLRQHSTGDLQYSPDYRNYLALINHRPHVKGNSSCYGVLPTEEPVYNWRTVINGWRRATRSFR

SEQ ID NO: 26443 - protein, 80 aa, Synthetic construct
RLFPGSSFLDLGDLNESDFLNNAHFPEHLDHFTENMEDFSNDLFSSFFDDPVLDEKSPLLDMELDSPTPGGWRRATRSFR

SEQ ID NO: 26444 - protein, 80 aa, Synthetic construct
DAFPGSSFLDLGDLNESDFLNNAHFPEHLDHFTENMEDFSNDLFSSFFDDPVLDEKSPLLDMELDSPTPGGWRRATRSFR

SEQ ID NO: 26445 - protein, 80 aa, Synthetic construct
DAVLGSSFLDLGDLNESDFLNNAHFPEHLDHFTENMEDFSNDLFSSFFDDPVLDEKSPLLDMELDSPTPGGWRRATRSFR

SEQ ID NO: 26446 - protein, 80 aa, Synthetic construct
DAVLEPSFLDLGDLNESDFLNNAHFPEHLDHFTENMEDFSNDLFSSFFDDPVLDEKSPLLDMELDSPTPGGWRRATRSFR

SEQ ID NO: 26447 - protein, 80 aa, Synthetic construct
DAVLEPFPLDLGDLNESDFLNNAHFPEHLDHFTENMEDFSNDLFSSFFDDPVLDEKSPLLDMELDSPTPGGWRRATRSFR

SEQ ID NO: 26448 - protein, 80 aa, Synthetic construct
DAVLEPFPADLGDLNESDFLNNAHFPEHLDHFTENMEDFSNDLFSSFFDDPVLDEKSPLLDMELDSPTPGGWRRATRSFR

SEQ ID NO: 26449 - protein, 80 aa, Synthetic construct
DAVLEPFPADRLDLNESDFLNNAHFPEHLDHFTENMEDFSNDLFSSFFDDPVLDEKSPLLDMELDSPTPGGWRRATRSFR

SEQ ID NO: 26450 - protein, 80 aa, Synthetic construct
DAVLEPFPADRLFPNESDFLNNAHFPEHLDHFTENMEDFSNDLFSSFFDDPVLDEKSPLLDMELDSPTPGGWRRATRSFR

SEQ ID NO: 26451 - protein, 80 aa, Synthetic construct
DAVLEPFPADRLFPGSSDFLNNAHFPEHLDHFTENMEDFSNDLFSSFFDDPVLDEKSPLLDMELDSPTPGGWRRATRSFR

SEQ ID NO: 26452 - protein, 80 aa, Synthetic construct
DAVLEPFPADRLFPGSSFFLNNAHFPEHLDHFTENMEDFSNDLFSSFFDDPVLDEKSPLLDMELDSPTPGGWRRATRSFR

SEQ ID NO: 26453 - protein, 80 aa, Synthetic construct
DAVLEPFPADRLFPGSSFLDNNAHFPEHLDHFTENMEDFSNDLFSSFFDDPVLDEKSPLLDMELDSPTPGGWRRATRSFR

SEQ ID NO: 26454 - protein, 80 aa, Synthetic construct
DAVLEPFPADRLFPGSSFLDLGAHFPEHLDHFTENMEDFSNDLFSSFFDDPVLDEKSPLLDMELDSPTPGGWRRATRSFR

SEQ ID NO: 26455 - protein, 80 aa, Synthetic construct
DAVLEPFPADRLFPGSSFLDLGDLFPEHLDHFTENMEDFSNDLFSSFFDDPVLDEKSPLLDMELDSPTPGGWRRATRSFR

SEQ ID NO: 26456 - protein, 80 aa, Synthetic construct
DAVLEPFPADRLFPGSSFLDLGDLNEEHLDHFTENMEDFSNDLFSSFFDDPVLDEKSPLLDMELDSPTPGGWRRATRSFR

SEQ ID NO: 26457 - protein, 80 aa, Synthetic construct
DAVLEPFPADRLFPGSSFLDLGDLNESDLDHFTENMEDFSNDLFSSFFDDPVLDEKSPLLDMELDSPTPGGWRRATRSFR

SEQ ID NO: 26458 - protein, 80 aa, Synthetic construct
DAVLEPFPADRLFPGSSFLDLGDLNESDFLHFTENMEDFSNDLFSSFFDDPVLDEKSPLLDMELDSPTPGGWRRATRSFR

SEQ ID NO: 26459 - protein, 80 aa, Synthetic construct
DAVLEPFPADRLFPGSSFLDLGDLNESDFLNNTENMEDFSNDLFSSFFDDPVLDEKSPLLDMELDSPTPGGWRRATRSFR

SEQ ID NO: 26460 - protein, 80 aa, Synthetic construct
DAVLEPFPADRLFPGSSFLDLGDLNESDFLNNAHNMEDFSNDLFSSFFDDPVLDEKSPLLDMELDSPTPGGWRRATRSFR

SEQ ID NO: 26461 - protein, 80 aa, Synthetic construct
DAVLEPFPADRLFPGSSFLDLGDLNESDFLNNAHFPEDFSNDLFSSFFDDPVLDEKSPLLDMELDSPTPGGWRRATRSFR

SEQ ID NO: 26462 - protein, 80 aa, Synthetic construct
DAVLEPFPADRLFPGSSFLDLGDLNESDFLNNAHFPEHFSNDLFSSFFDDPVLDEKSPLLDMELDSPTPGGWRRATRSFR

SEQ ID NO: 26463 - protein, 80 aa, Synthetic construct
DAVLEPFPADRLFPGSSFLDLGDLNESDFLNNAHFPEHLDNDLFSSFFDDPVLDEKSPLLDMELDSPTPGGWRRATRSFR

SEQ ID NO: 26464 - protein, 80 aa, Synthetic construct
DAVLEPFPADRLFPGSSFLDLGDLNESDFLNNAHFPEHLDHFTESSFFDDPVLDEKSPLLDMELDSPTPGGWRRATRSFR

SEQ ID NO: 26465 - protein, 80 aa, Synthetic construct
DAVLEPFPADRLFPGSSFLDLGDLNESDFLNNAHFPEHLDHFTENMFFDDPVLDEKSPLLDMELDSPTPGGWRRATRSFR

SEQ ID NO: 26466 - protein, 80 aa, Synthetic construct
DAVLEPFPADRLFPGSSFLDLGDLNESDFLNNAHFPEHLDHFTENMEDFSPVLDEKSPLLDMELDSPTPGGWRRATRSFR

SEQ ID NO: 26467 - protein, 80 aa, Synthetic construct
DAVLEPFPADRLFPGSSFLDLGDLNESDFLNNAHFPEHLDHFTENMEDFSNDLDEKSPLLDMELDSPTPGGWRRATRSFR

SEQ ID NO: 26468 - protein, 80 aa, Synthetic construct
DAVLEPFPADRLFPGSSFLDLGDLNESDFLNNAHFPEHLDHFTENMEDFSNDLFEKSPLLDMELDSPTPGGWRRATRSFR

SEQ ID NO: 26469 - protein, 80 aa, Synthetic construct
DAVLEPFPADRLFPGSSFLDLGDLNESDFLNNAHFPEHLDHFTENMEDFSNDLFSSSPLLDMELDSPTPGGWRRATRSFR

SEQ ID NO: 26470 - protein, 80 aa, Synthetic construct
DAVLEPFPADRLFPGSSFLDLGDLNESDFLNNAHFPEHLDHFTENMEDFSNDLFSSFFDDDMELDSPTPGGWRRATRSFR

SEQ ID NO: 26471 - protein, 80 aa, Synthetic construct
DAVLEPFPADRLFPGSSFLDLGDLNESDFLNNAHFPEHLDHFTENMEDFSNDLFSSFFDDPVELDSPTPGGWRRATRSFR

SEQ ID NO: 26472 - protein, 80 aa, Synthetic construct
DAVLEPFPADRLFPGSSFLDLGDLNESDFLNNAHFPEHLDHFTENMEDFSNDLFSSFFDDPVLDDSPTPGGWRRATRSFR

SEQ ID NO: 26473 - protein, 80 aa, Synthetic construct
DAVLEPFPADRLFPGSSFLDLGDLNESDFLNNAHFPEHLDHFTENMEDFSNDLFSSFFDDPVLDEKPTPGGWRRATRSFR

SEQ ID NO: 26474 - protein, 80 aa, Synthetic construct
DAVLEPFPADRLFPGSSFLDLGDLNESDFLNNAHFPEHLDHFTENMEDFSNDLFSSFFDDPVLDEKSPPGGWRRATRSFR

SEQ ID NO: 26475 - protein, 80 aa, Synthetic construct
DAVLEPFPADRLFPGSSFLDLGDLNESDFLNNAHFPEHLDHFTENMEDFSNDLFSSFFDDPVLDEKSPLLGWRRATRSFR

SEQ ID NO: 26476 - protein, 80 aa, Synthetic construct
LGDLNESDFLNNAHFPEHLDHFTENMEDFSNDLFSSFFDDPVLDEKSPLLDMELDSPTPGIQAEHSYSLSGWRRATRSFR

SEQ ID NO: 26477 - protein, 80 aa, Synthetic construct
RLDLNESDFLNNAHFPEHLDHFTENMEDFSNDLFSSFFDDPVLDEKSPLLDMELDSPTPGIQAEHSYSLSGWRRATRSFR

SEQ ID NO: 26478 - protein, 80 aa, Synthetic construct
RLFPNESDFLNNAHFPEHLDHFTENMEDFSNDLFSSFFDDPVLDEKSPLLDMELDSPTPGIQAEHSYSLSGWRRATRSFR

SEQ ID NO: 26479 - protein, 80 aa, Synthetic construct
RLFPGSSFLDNNAHFPEHLDHFTENMEDFSNDLFSSFFDDPVLDEKSPLLDMELDSPTPGIQAEHSYSLSGWRRATRSFR

SEQ ID NO: 26480 - protein, 80 aa, Synthetic construct
RLFPGSSFLDLGAHFPEHLDHFTENMEDFSNDLFSSFFDDPVLDEKSPLLDMELDSPTPGIQAEHSYSLSGWRRATRSFR

SEQ ID NO: 26481 - protein, 80 aa, Synthetic construct
RLFPGSSFLDLGDLFPEHLDHFTENMEDFSNDLFSSFFDDPVLDEKSPLLDMELDSPTPGIQAEHSYSLSGWRRATRSFR

SEQ ID NO: 26482 - protein, 80 aa, Synthetic construct
RLFPGSSFLDLGDLNEEHLDHFTENMEDFSNDLFSSFFDDPVLDEKSPLLDMELDSPTPGIQAEHSYSLSGWRRATRSFR

SEQ ID NO: 26483 - protein, 80 aa, Synthetic construct
RLFPGSSFLDLGDLNESDLDHFTENMEDFSNDLFSSFFDDPVLDEKSPLLDMELDSPTPGIQAEHSYSLSGWRRATRSFR

SEQ ID NO: 26484 - protein, 80 aa, Synthetic construct
RLFPGSSFLDLGDLNESDFLNNTENMEDFSNDLFSSFFDDPVLDEKSPLLDMELDSPTPGIQAEHSYSLSGWRRATRSFR

SEQ ID NO: 26485 - protein, 80 aa, Synthetic construct
RLFPGSSFLDLGDLNESDFLNNAHNMEDFSNDLFSSFFDDPVLDEKSPLLDMELDSPTPGIQAEHSYSLSGWRRATRSFR

SEQ ID NO: 26486 - protein, 80 aa, Synthetic construct
RLFPGSSFLDLGDLNESDFLNNAHFPEDFSNDLFSSFFDDPVLDEKSPLLDMELDSPTPGIQAEHSYSLSGWRRATRSFR

SEQ ID NO: 26487 - protein, 80 aa, Synthetic construct
RLFPGSSFLDLGDLNESDFLNNAHFPEHFSNDLFSSFFDDPVLDEKSPLLDMELDSPTPGIQAEHSYSLSGWRRATRSFR

SEQ ID NO: 26488 - protein, 80 aa, Synthetic construct
RLFPGSSFLDLGDLNESDFLNNAHFPEHLDNDLFSSFFDDPVLDEKSPLLDMELDSPTPGIQAEHSYSLSGWRRATRSFR

SEQ ID NO: 26489 - protein, 80 aa, Synthetic construct
RLFPGSSFLDLGDLNESDFLNNAHFPEHLDHFTENMEDFSNDLFSSSPLLDMELDSPTPGIQAEHSYSLSGWRRATRSFR

SEQ ID NO: 26490 - protein, 80 aa, Synthetic construct
RLFPGSSFLDLGDLNESDFLNNAHFPEHLDHFTENMEDFSNDLFSSFFDDDMELDSPTPGIQAEHSYSLSGWRRATRSFR

SEQ ID NO: 26491 - protein, 80 aa, Synthetic construct
RLFPGSSFLDLGDLNESDFLNNAHFPEHLDHFTENMEDFSNDLFSSFFDDPVELDSPTPGIQAEHSYSLSGWRRATRSFR

SEQ ID NO: 26492 - protein, 80 aa, Synthetic construct
RLFPGSSFLDLGDLNESDFLNNAHFPEHLDHFTENMEDFSNDLFSSFFDDPVLDDSPTPGIQAEHSYSLSGWRRATRSFR

SEQ ID NO: 26493 - protein, 80 aa, Synthetic construct
RLFPGSSFLDLGDLNESDFLNNAHFPEHLDHFTENMEDFSNDLFSSFFDDPVLDEKPTPGIQAEHSYSLSGWRRATRSFR

SEQ ID NO: 26494 - protein, 80 aa, Synthetic construct
RLFPGSSFLDLGDLNESDFLNNAHFPEHLDHFTENMEDFSNDLFSSFFDDPVLDEKSPPGIQAEHSYSLSGWRRATRSFR

SEQ ID NO: 26495 - protein, 80 aa, Synthetic construct
RLFPGSSFLDLGDLNESDFLNNAHFPEHLDHFTENMEDFSNDLFSSFFDDPVLDEKSPLLIQAEHSYSLSGWRRATRSFR

SEQ ID NO: 26496 - protein, 80 aa, Synthetic construct
RLFPGSSFLDLGDLNESDFLNNAHFPEHLDHFTENMEDFSNDLFSSFFDDPVLDEKSPLLDMELDSPTLSGWRRATRSFR

SEQ ID NO: 26497 - protein, 80 aa, Synthetic construct
HQGCLVNPTGNLPMWSNQTWNNSTWSNQTQNIQSWSNHSWNTQTWCTQSWNNQAWNSPFYNCGEESLQSCGWRRATRSFR

SEQ ID NO: 26498 - protein, 80 aa, Synthetic construct
PTGCLVNPTGNLPMWSNQTWNNSTWSNQTQNIQSWSNHSWNTQTWCTQSWNNQAWNSPFYNCGEESLQSCGWRRATRSFR

SEQ ID NO: 26499 - protein, 80 aa, Synthetic construct
PTYPLVNPTGNLPMWSNQTWNNSTWSNQTQNIQSWSNHSWNTQTWCTQSWNNQAWNSPFYNCGEESLQSCGWRRATRSFR

SEQ ID NO: 26500 - protein, 80 aa, Synthetic construct
PTYPSLNPTGNLPMWSNQTWNNSTWSNQTQNIQSWSNHSWNTQTWCTQSWNNQAWNSPFYNCGEESLQSCGWRRATRSFR

SEQ ID NO: 26501 - protein, 80 aa, Synthetic construct
PTYPSLYSTGNLPMWSNQTWNNSTWSNQTQNIQSWSNHSWNTQTWCTQSWNNQAWNSPFYNCGEESLQSCGWRRATRSFR

SEQ ID NO: 26502 - protein, 80 aa, Synthetic construct
PTYPSLYSSYHQPMWSNQTWNNSTWSNQTQNIQSWSNHSWNTQTWCTQSWNNQAWNSPFYNCGEESLQSCGWRRATRSFR

SEQ ID NO: 26503 - protein, 80 aa, Synthetic construct
PTYPSLYSSYHQGCWSNQTWNNSTWSNQTQNIQSWSNHSWNTQTWCTQSWNNQAWNSPFYNCGEESLQSCGWRRATRSFR

SEQ ID NO: 26504 - protein, 80 aa, Synthetic construct
PTYPSLYSSYHQGCLVNQTWNNSTWSNQTQNIQSWSNHSWNTQTWCTQSWNNQAWNSPFYNCGEESLQSCGWRRATRSFR

SEQ ID NO: 26505 - protein, 80 aa, Synthetic construct
PTYPSLYSSYHQGCLVNPTGNNSTWSNQTQNIQSWSNHSWNTQTWCTQSWNNQAWNSPFYNCGEESLQSCGWRRATRSFR

SEQ ID NO: 26506 - protein, 80 aa, Synthetic construct
PTYPSLYSSYHQGCLVNPTGNLSTWSNQTQNIQSWSNHSWNTQTWCTQSWNNQAWNSPFYNCGEESLQSCGWRRATRSFR

SEQ ID NO: 26507 - protein, 80 aa, Synthetic construct
PTYPSLYSSYHQGCLVNPTGNLPMWSNQTQNIQSWSNHSWNTQTWCTQSWNNQAWNSPFYNCGEESLQSCGWRRATRSFR

SEQ ID NO: 26508 - protein, 80 aa, Synthetic construct
PTYPSLYSSYHQGCLVNPTGNLPMWSNQTWNNSTWSNQTQNTQTWCTQSWNNQAWNSPFYNCGEESLQSCGWRRATRSFR

SEQ ID NO: 26509 - protein, 80 aa, Synthetic construct
PTYPSLYSSYHQGCLVNPTGNLPMWSNQTWNNSTWSNQTQNIQTWCTQSWNNQAWNSPFYNCGEESLQSCGWRRATRSFR

SEQ ID NO: 26510 - protein, 80 aa, Synthetic construct
PTYPSLYSSYHQGCLVNPTGNLPMWSNQTWNNSTWSNQTQNIQSWCTQSWNNQAWNSPFYNCGEESLQSCGWRRATRSFR

SEQ ID NO: 26511 - protein, 80 aa, Synthetic construct
PTYPSLYSSYHQGCLVNPTGNLPMWSNQTWNNSTWSNQTQNIQSWSTQSWNNQAWNSPFYNCGEESLQSCGWRRATRSFR

SEQ ID NO: 26512 - protein, 80 aa, Synthetic construct
PTYPSLYSSYHQGCLVNPTGNLPMWSNQTWNNSTWSNQTQNIQSWSNHSWNNQAWNSPFYNCGEESLQSCGWRRATRSFR

SEQ ID NO: 26513 - protein, 80 aa, Synthetic construct
PTYPSLYSSYHQGCLVNPTGNLPMWSNQTWNNSTWSNQTQNIQSWSNHSWNTQAWNSPFYNCGEESLQSCGWRRATRSFR

SEQ ID NO: 26514 - protein, 80 aa, Synthetic construct
PTYPSLYSSYHQGCLVNPTGNLPMWSNQTWNNSTWSNQTQNIQSWSNHSWNTQTWNSPFYNCGEESLQSCGWRRATRSFR

SEQ ID NO: 26515 - protein, 80 aa, Synthetic construct
PTYPSLYSSYHQGCLVNPTGNLPMWSNQTWNNSTWSNQTQNIQSWSNHSWNTQTWCSPFYNCGEESLQSCGWRRATRSFR

SEQ ID NO: 26516 - protein, 80 aa, Synthetic construct
PTYPSLYSSYHQGCLVNPTGNLPMWSNQTWNNSTWSNQTQNIQSWSNHSWNTQTWCTQFYNCGEESLQSCGWRRATRSFR

SEQ ID NO: 26517 - protein, 80 aa, Synthetic construct
PTYPSLYSSYHQGCLVNPTGNLPMWSNQTWNNSTWSNQTQNIQSWSNHSWNTQTWCTQSWNCGEESLQSCGWRRATRSFR

SEQ ID NO: 26518 - protein, 80 aa, Synthetic construct
PTYPSLYSSYHQGCLVNPTGNLPMWSNQTWNNSTWSNQTQNIQSWSNHSWNTQTWCTQSWNNGEESLQSCGWRRATRSFR

SEQ ID NO: 26519 - protein, 80 aa, Synthetic construct
PTYPSLYSSYHQGCLVNPTGNLPMWSNQTWNNSTWSNQTQNIQSWSNHSWNTQTWCTQSWNNQAESLQSCGWRRATRSFR

SEQ ID NO: 26520 - protein, 80 aa, Synthetic construct
PTYPSLYSSYHQGCLVNPTGNLPMWSNQTWNNSTWSNQTQNIQSWSNHSWNTQTWCTQSWNNQAWNLQSCGWRRATRSFR

SEQ ID NO: 26521 - protein, 80 aa, Synthetic construct
PTYPSLYSSYHQGCLVNPTGNLPMWSNQTWNNSTWSNQTQNIQSWSNHSWNTQTWCTQSWNNQAWNSPSCGWRRATRSFR

SEQ ID NO: 26522 - protein, 80 aa, Synthetic construct
NLPMWSNQTWNNSTWSNQTQNIQSWSNHSWNTQTWCTQSWNNQAWNSPFYNCGEESLQSCMQFQPNSPASGWRRATRSFR

SEQ ID NO: 26523 - protein, 80 aa, Synthetic construct
HQPMWSNQTWNNSTWSNQTQNIQSWSNHSWNTQTWCTQSWNNQAWNSPFYNCGEESLQSCMQFQPNSPASGWRRATRSFR

SEQ ID NO: 26524 - protein, 80 aa, Synthetic construct
HQGCWSNQTWNNSTWSNQTQNIQSWSNHSWNTQTWCTQSWNNQAWNSPFYNCGEESLQSCMQFQPNSPASGWRRATRSFR

SEQ ID NO: 26525 - protein, 80 aa, Synthetic construct
HQGCLVNQTWNNSTWSNQTQNIQSWSNHSWNTQTWCTQSWNNQAWNSPFYNCGEESLQSCMQFQPNSPASGWRRATRSFR

SEQ ID NO: 26526 - protein, 80 aa, Synthetic construct
HQGCLVNPTWNNSTWSNQTQNIQSWSNHSWNTQTWCTQSWNNQAWNSPFYNCGEESLQSCMQFQPNSPASGWRRATRSFR

SEQ ID NO: 26527 - protein, 80 aa, Synthetic construct
HQGCLVNPTGNNSTWSNQTQNIQSWSNHSWNTQTWCTQSWNNQAWNSPFYNCGEESLQSCMQFQPNSPASGWRRATRSFR

SEQ ID NO: 26528 - protein, 80 aa, Synthetic construct
HQGCLVNPTGNLSTWSNQTQNIQSWSNHSWNTQTWCTQSWNNQAWNSPFYNCGEESLQSCMQFQPNSPASGWRRATRSFR

SEQ ID NO: 26529 - protein, 80 aa, Synthetic construct
HQGCLVNPTGNLPMWSNQTQNIQSWSNHSWNTQTWCTQSWNNQAWNSPFYNCGEESLQSCMQFQPNSPASGWRRATRSFR

SEQ ID NO: 26530 - protein, 80 aa, Synthetic construct
HQGCLVNPTGNLPMWSNQTWNNQSWSNHSWNTQTWCTQSWNNQAWNSPFYNCGEESLQSCMQFQPNSPASGWRRATRSFR

SEQ ID NO: 26531 - protein, 80 aa, Synthetic construct
HQGCLVNPTGNLPMWSNQTWNNSTWSNHSWNTQTWCTQSWNNQAWNSPFYNCGEESLQSCMQFQPNSPASGWRRATRSFR

SEQ ID NO: 26532 - protein, 80 aa, Synthetic construct
HQGCLVNPTGNLPMWSNQTWNNSTWSNQSWNTQTWCTQSWNNQAWNSPFYNCGEESLQSCMQFQPNSPASGWRRATRSFR

SEQ ID NO: 26533 - protein, 80 aa, Synthetic construct
HQGCLVNPTGNLPMWSNQTWNNSTWSNQTQNTQTWCTQSWNNQAWNSPFYNCGEESLQSCMQFQPNSPASGWRRATRSFR

SEQ ID NO: 26534 - protein, 80 aa, Synthetic construct
HQGCLVNPTGNLPMWSNQTWNNSTWSNQTQNIQTWCTQSWNNQAWNSPFYNCGEESLQSCMQFQPNSPASGWRRATRSFR

SEQ ID NO: 26535 - protein, 80 aa, Synthetic construct
HQGCLVNPTGNLPMWSNQTWNNSTWSNQTQNIQSWCTQSWNNQAWNSPFYNCGEESLQSCMQFQPNSPASGWRRATRSFR

SEQ ID NO: 26536 - protein, 80 aa, Synthetic construct
HQGCLVNPTGNLPMWSNQTWNNSTWSNQTQNIQSWSTQSWNNQAWNSPFYNCGEESLQSCMQFQPNSPASGWRRATRSFR

SEQ ID NO: 26537 - protein, 80 aa, Synthetic construct
HQGCLVNPTGNLPMWSNQTWNNSTWSNQTQNIQSWSNHSWNNQAWNSPFYNCGEESLQSCMQFQPNSPASGWRRATRSFR

SEQ ID NO: 26538 - protein, 80 aa, Synthetic construct
HQGCLVNPTGNLPMWSNQTWNNSTWSNQTQNIQSWSNHSWNTQAWNSPFYNCGEESLQSCMQFQPNSPASGWRRATRSFR

SEQ ID NO: 26539 - protein, 80 aa, Synthetic construct
HQGCLVNPTGNLPMWSNQTWNNSTWSNQTQNIQSWSNHSWNTQTWNSPFYNCGEESLQSCMQFQPNSPASGWRRATRSFR

SEQ ID NO: 26540 - protein, 80 aa, Synthetic construct
HQGCLVNPTGNLPMWSNQTWNNSTWSNQTQNIQSWSNHSWNTQTWCSPFYNCGEESLQSCMQFQPNSPASGWRRATRSFR

SEQ ID NO: 26541 - protein, 80 aa, Synthetic construct
HQGCLVNPTGNLPMWSNQTWNNSTWSNQTQNIQSWSNHSWNTQTWCTQFYNCGEESLQSCMQFQPNSPASGWRRATRSFR

SEQ ID NO: 26542 - protein, 80 aa, Synthetic construct
HQGCLVNPTGNLPMWSNQTWNNSTWSNQTQNIQSWSNHSWNTQTWCTQSWNCGEESLQSCMQFQPNSPASGWRRATRSFR

SEQ ID NO: 26543 - protein, 80 aa, Synthetic construct
HQGCLVNPTGNLPMWSNQTWNNSTWSNQTQNIQSWSNHSWNTQTWCTQSWNNGEESLQSCMQFQPNSPASGWRRATRSFR

SEQ ID NO: 26544 - protein, 80 aa, Synthetic construct
HQGCLVNPTGNLPMWSNQTWNNSTWSNQTQNIQSWSNHSWNTQTWCTQSWNNQAESLQSCMQFQPNSPASGWRRATRSFR

SEQ ID NO: 26545 - protein, 80 aa, Synthetic construct
HQGCLVNPTGNLPMWSNQTWNNSTWSNQTQNIQSWSNHSWNTQTWCTQSWNNQAWNLQSCMQFQPNSPASGWRRATRSFR

SEQ ID NO: 26546 - protein, 80 aa, Synthetic construct
HQGCLVNPTGNLPMWSNQTWNNSTWSNQTQNIQSWSNHSWNTQTWCTQSWNNQAWNSPSCMQFQPNSPASGWRRATRSFR

SEQ ID NO: 26547 - protein, 80 aa, Synthetic construct
HQGCLVNPTGNLPMWSNQTWNNSTWSNQTQNIQSWSNHSWNTQTWCTQSWNNQAWNSPFYMQFQPNSPASGWRRATRSFR

SEQ ID NO: 26548 - protein, 80 aa, Synthetic construct
HQGCLVNPTGNLPMWSNQTWNNSTWSNQTQNIQSWSNHSWNTQTWCTQSWNNQAWNSPFYNCFQPNSPASGWRRATRSFR

SEQ ID NO: 26549 - protein, 80 aa, Synthetic construct
HQGCLVNPTGNLPMWSNQTWNNSTWSNQTQNIQSWSNHSWNTQTWCTQSWNNQAWNSPFYNCGEPNSPASGWRRATRSFR

SEQ ID NO: 26550 - protein, 80 aa, Synthetic construct
HQGCLVNPTGNLPMWSNQTWNNSTWSNQTQNIQSWSNHSWNTQTWCTQSWNNQAWNSPFYNCGEESSPASGWRRATRSFR

SEQ ID NO: 26551 - protein, 80 aa, Synthetic construct
HQGCLVNPTGNLPMWSNQTWNNSTWSNQTQNIQSWSNHSWNTQTWCTQSWNNQAWNSPFYNCGEESLQASGWRRATRSFR

SEQ ID NO: 26552 - protein, 80 aa, Synthetic construct
NNSTWSNQTQNIQSWSNHSWNTQTWCTQSWNNQAWNSPFYNCGEESLQSCMQFQPNSPASDLEAALEAAGGWRRATRSFR

SEQ ID NO: 26553 - protein, 80 aa, Synthetic construct
NLSTWSNQTQNIQSWSNHSWNTQTWCTQSWNNQAWNSPFYNCGEESLQSCMQFQPNSPASDLEAALEAAGGWRRATRSFR

SEQ ID NO: 26554 - protein, 80 aa, Synthetic construct
NLPMWSNQTQNIQSWSNHSWNTQTWCTQSWNNQAWNSPFYNCGEESLQSCMQFQPNSPASDLEAALEAAGGWRRATRSFR

SEQ ID NO: 26555 - protein, 80 aa, Synthetic construct
NLPMWSNQTWNIQSWSNHSWNTQTWCTQSWNNQAWNSPFYNCGEESLQSCMQFQPNSPASDLEAALEAAGGWRRATRSFR

SEQ ID NO: 26556 - protein, 80 aa, Synthetic construct
NLPMWSNQTWNNQSWSNHSWNTQTWCTQSWNNQAWNSPFYNCGEESLQSCMQFQPNSPASDLEAALEAAGGWRRATRSFR

SEQ ID NO: 26557 - protein, 80 aa, Synthetic construct
NLPMWSNQTWNNSTWSNHSWNTQTWCTQSWNNQAWNSPFYNCGEESLQSCMQFQPNSPASDLEAALEAAGGWRRATRSFR

SEQ ID NO: 26558 - protein, 80 aa, Synthetic construct
NLPMWSNQTWNNSTWSNQSWNTQTWCTQSWNNQAWNSPFYNCGEESLQSCMQFQPNSPASDLEAALEAAGGWRRATRSFR

SEQ ID NO: 26559 - protein, 80 aa, Synthetic construct
NLPMWSNQTWNNSTWSNQTQNTQTWCTQSWNNQAWNSPFYNCGEESLQSCMQFQPNSPASDLEAALEAAGGWRRATRSFR

SEQ ID NO: 26560 - protein, 80 aa, Synthetic construct
NLPMWSNQTWNNSTWSNQTQNIQTWCTQSWNNQAWNSPFYNCGEESLQSCMQFQPNSPASDLEAALEAAGGWRRATRSFR

SEQ ID NO: 26561 - protein, 80 aa, Synthetic construct
NLPMWSNQTWNNSTWSNQTQNIQSWCTQSWNNQAWNSPFYNCGEESLQSCMQFQPNSPASDLEAALEAAGGWRRATRSFR

SEQ ID NO: 26562 - protein, 80 aa, Synthetic construct
NLPMWSNQTWNNSTWSNQTQNIQSWSTQSWNNQAWNSPFYNCGEESLQSCMQFQPNSPASDLEAALEAAGGWRRATRSFR

SEQ ID NO: 26563 - protein, 80 aa, Synthetic construct
NLPMWSNQTWNNSTWSNQTQNIQSWSNHSWNNQAWNSPFYNCGEESLQSCMQFQPNSPASDLEAALEAAGGWRRATRSFR

SEQ ID NO: 26564 - protein, 80 aa, Synthetic construct
NLPMWSNQTWNNSTWSNQTQNIQSWSNHSWNTQAWNSPFYNCGEESLQSCMQFQPNSPASDLEAALEAAGGWRRATRSFR

SEQ ID NO: 26565 - protein, 80 aa, Synthetic construct
NLPMWSNQTWNNSTWSNQTQNIQSWSNHSWNTQTWNSPFYNCGEESLQSCMQFQPNSPASDLEAALEAAGGWRRATRSFR

SEQ ID NO: 26566 - protein, 80 aa, Synthetic construct
NLPMWSNQTWNNSTWSNQTQNIQSWSNHSWNTQTWCSPFYNCGEESLQSCMQFQPNSPASDLEAALEAAGGWRRATRSFR

SEQ ID NO: 26567 - protein, 80 aa, Synthetic construct
NLPMWSNQTWNNSTWSNQTQNIQSWSNHSWNTQTWCTQFYNCGEESLQSCMQFQPNSPASDLEAALEAAGGWRRATRSFR

SEQ ID NO: 26568 - protein, 80 aa, Synthetic construct
NLPMWSNQTWNNSTWSNQTQNIQSWSNHSWNTQTWCTQSWNCGEESLQSCMQFQPNSPASDLEAALEAAGGWRRATRSFR

SEQ ID NO: 26569 - protein, 80 aa, Synthetic construct
NLPMWSNQTWNNSTWSNQTQNIQSWSNHSWNTQTWCTQSWNNGEESLQSCMQFQPNSPASDLEAALEAAGGWRRATRSFR

SEQ ID NO: 26570 - protein, 80 aa, Synthetic construct
NLPMWSNQTWNNSTWSNQTQNIQSWSNHSWNTQTWCTQSWNNQAESLQSCMQFQPNSPASDLEAALEAAGGWRRATRSFR

SEQ ID NO: 26571 - protein, 80 aa, Synthetic construct
NLPMWSNQTWNNSTWSNQTQNIQSWSNHSWNTQTWCTQSWNNQAWNLQSCMQFQPNSPASDLEAALEAAGGWRRATRSFR

SEQ ID NO: 26572 - protein, 80 aa, Synthetic construct
NLPMWSNQTWNNSTWSNQTQNIQSWSNHSWNTQTWCTQSWNNQAWNSPSCMQFQPNSPASDLEAALEAAGGWRRATRSFR

SEQ ID NO: 26573 - protein, 80 aa, Synthetic construct
NLPMWSNQTWNNSTWSNQTQNIQSWSNHSWNTQTWCTQSWNNQAWNSPFYMQFQPNSPASDLEAALEAAGGWRRATRSFR

SEQ ID NO: 26574 - protein, 80 aa, Synthetic construct
NLPMWSNQTWNNSTWSNQTQNIQSWSNHSWNTQTWCTQSWNNQAWNSPFYNCFQPNSPASDLEAALEAAGGWRRATRSFR

SEQ ID NO: 26575 - protein, 80 aa, Synthetic construct
NLPMWSNQTWNNSTWSNQTQNIQSWSNHSWNTQTWCTQSWNNQAWNSPFYNCGEPNSPASDLEAALEAAGGWRRATRSFR

SEQ ID NO: 26576 - protein, 80 aa, Synthetic construct
NLPMWSNQTWNNSTWSNQTQNIQSWSNHSWNTQTWCTQSWNNQAWNSPFYNCGEESSPASDLEAALEAAGGWRRATRSFR

SEQ ID NO: 26577 - protein, 80 aa, Synthetic construct
NLPMWSNQTWNNSTWSNQTQNIQSWSNHSWNTQTWCTQSWNNQAWNSPFYNCGEESLQASDLEAALEAAGGWRRATRSFR

SEQ ID NO: 26578 - protein, 80 aa, Synthetic construct
NLPMWSNQTWNNSTWSNQTQNIQSWSNHSWNTQTWCTQSWNNQAWNSPFYNCGEESLQSCDLEAALEAAGGWRRATRSFR

SEQ ID NO: 26579 - protein, 80 aa, Synthetic construct
NLPMWSNQTWNNSTWSNQTQNIQSWSNHSWNTQTWCTQSWNNQAWNSPFYNCGEESLQSCMQEAALEAAGGWRRATRSFR

SEQ ID NO: 26580 - protein, 80 aa, Synthetic construct
NLPMWSNQTWNNSTWSNQTQNIQSWSNHSWNTQTWCTQSWNNQAWNSPFYNCGEESLQSCMQFQALEAAGGWRRATRSFR

SEQ ID NO: 26581 - protein, 80 aa, Synthetic construct
NLPMWSNQTWNNSTWSNQTQNIQSWSNHSWNTQTWCTQSWNNQAWNSPFYNCGEESLQSCMQFQPNEAAGGWRRATRSFR

SEQ ID NO: 26582 - protein, 80 aa, Synthetic construct
NLPMWSNQTWNNSTWSNQTQNIQSWSNHSWNTQTWCTQSWNNQAWNSPFYNCGEESLQSCMQFQPNSPAGGWRRATRSFR

SEQ ID NO: 26583 - protein, 80 aa, Synthetic construct
NTQTWCTQSWNNQAWNSPFYNCGEESLQSCMQFQPNSPASDLEAALEAAGEGLNVIQQTTRYFSTPQTMDGWRRATRSFR

SEQ ID NO: 26584 - protein, 80 aa, Synthetic construct
NIQTWCTQSWNNQAWNSPFYNCGEESLQSCMQFQPNSPASDLEAALEAAGEGLNVIQQTTRYFSTPQTMDGWRRATRSFR

SEQ ID NO: 26585 - protein, 80 aa, Synthetic construct
NIQSWCTQSWNNQAWNSPFYNCGEESLQSCMQFQPNSPASDLEAALEAAGEGLNVIQQTTRYFSTPQTMDGWRRATRSFR

SEQ ID NO: 26586 - protein, 80 aa, Synthetic construct
NIQSWSNHSWNTQAWNSPFYNCGEESLQSCMQFQPNSPASDLEAALEAAGEGLNVIQQTTRYFSTPQTMDGWRRATRSFR

SEQ ID NO: 26587 - protein, 80 aa, Synthetic construct
NIQSWSNHSWNTQTWCSPFYNCGEESLQSCMQFQPNSPASDLEAALEAAGEGLNVIQQTTRYFSTPQTMDGWRRATRSFR

SEQ ID NO: 26588 - protein, 80 aa, Synthetic construct
NIQSWSNHSWNTQTWCTQFYNCGEESLQSCMQFQPNSPASDLEAALEAAGEGLNVIQQTTRYFSTPQTMDGWRRATRSFR

SEQ ID NO: 26589 - protein, 80 aa, Synthetic construct
NIQSWSNHSWNTQTWCTQSWNNQAWNLQSCMQFQPNSPASDLEAALEAAGEGLNVIQQTTRYFSTPQTMDGWRRATRSFR

SEQ ID NO: 26590 - protein, 80 aa, Synthetic construct
NIQSWSNHSWNTQTWCTQSWNNQAWNSPSCMQFQPNSPASDLEAALEAAGEGLNVIQQTTRYFSTPQTMDGWRRATRSFR

SEQ ID NO: 26591 - protein, 80 aa, Synthetic construct
NIQSWSNHSWNTQTWCTQSWNNQAWNSPFYMQFQPNSPASDLEAALEAAGEGLNVIQQTTRYFSTPQTMDGWRRATRSFR

SEQ ID NO: 26592 - protein, 80 aa, Synthetic construct
NIQSWSNHSWNTQTWCTQSWNNQAWNSPFYNCFQPNSPASDLEAALEAAGEGLNVIQQTTRYFSTPQTMDGWRRATRSFR

SEQ ID NO: 26593 - protein, 80 aa, Synthetic construct
NIQSWSNHSWNTQTWCTQSWNNQAWNSPFYNCGEPNSPASDLEAALEAAGEGLNVIQQTTRYFSTPQTMDGWRRATRSFR

SEQ ID NO: 26594 - protein, 80 aa, Synthetic construct
NIQSWSNHSWNTQTWCTQSWNNQAWNSPFYNCGEESSPASDLEAALEAAGEGLNVIQQTTRYFSTPQTMDGWRRATRSFR

SEQ ID NO: 26595 - protein, 80 aa, Synthetic construct
NIQSWSNHSWNTQTWCTQSWNNQAWNSPFYNCGEESLQASDLEAALEAAGEGLNVIQQTTRYFSTPQTMDGWRRATRSFR

SEQ ID NO: 26596 - protein, 80 aa, Synthetic construct
NIQSWSNHSWNTQTWCTQSWNNQAWNSPFYNCGEESLQSCDLEAALEAAGEGLNVIQQTTRYFSTPQTMDGWRRATRSFR

SEQ ID NO: 26597 - protein, 80 aa, Synthetic construct
NIQSWSNHSWNTQTWCTQSWNNQAWNSPFYNCGEESLQSCMQEAALEAAGEGLNVIQQTTRYFSTPQTMDGWRRATRSFR

SEQ ID NO: 26598 - protein, 80 aa, Synthetic construct
NIQSWSNHSWNTQTWCTQSWNNQAWNSPFYNCGEESLQSCMQFQALEAAGEGLNVIQQTTRYFSTPQTMDGWRRATRSFR

SEQ ID NO: 26599 - protein, 80 aa, Synthetic construct
NIQSWSNHSWNTQTWCTQSWNNQAWNSPFYNCGEESLQSCMQFQPNEAAGEGLNVIQQTTRYFSTPQTMDGWRRATRSFR

SEQ ID NO: 26600 - protein, 80 aa, Synthetic construct
NIQSWSNHSWNTQTWCTQSWNNQAWNSPFYNCGEESLQSCMQFQPNSPAGEGLNVIQQTTRYFSTPQTMDGWRRATRSFR

SEQ ID NO: 26601 - protein, 80 aa, Synthetic construct
NIQSWSNHSWNTQTWCTQSWNNQAWNSPFYNCGEESLQSCMQFQPNSPASEGLNVIQQTTRYFSTPQTMDGWRRATRSFR

SEQ ID NO: 26602 - protein, 80 aa, Synthetic construct
NIQSWSNHSWNTQTWCTQSWNNQAWNSPFYNCGEESLQSCMQFQPNSPASDLLNVIQQTTRYFSTPQTMDGWRRATRSFR

SEQ ID NO: 26603 - protein, 80 aa, Synthetic construct
NIQSWSNHSWNTQTWCTQSWNNQAWNSPFYNCGEESLQSCMQFQPNSPASDLEAALQQTTRYFSTPQTMDGWRRATRSFR

SEQ ID NO: 26604 - protein, 80 aa, Synthetic construct
NIQSWSNHSWNTQTWCTQSWNNQAWNSPFYNCGEESLQSCMQFQPNSPASDLEAALEAAGEGFSTPQTMDGWRRATRSFR

SEQ ID NO: 26605 - protein, 80 aa, Synthetic construct
NIQSWSNHSWNTQTWCTQSWNNQAWNSPFYNCGEESLQSCMQFQPNSPASDLEAALEAAGEGLNTPQTMDGWRRATRSFR

SEQ ID NO: 26606 - protein, 80 aa, Synthetic construct
NIQSWSNHSWNTQTWCTQSWNNQAWNSPFYNCGEESLQSCMQFQPNSPASDLEAALEAAGEGLNVIQTMDGWRRATRSFR

SEQ ID NO: 26607 - protein, 80 aa, Synthetic construct
NIQSWSNHSWNTQTWCTQSWNNQAWNSPFYNCGEESLQSCMQFQPNSPASDLEAALEAAGEGLNVIQQMDGWRRATRSFR

SEQ ID NO: 26608 - protein, 80 aa, Synthetic construct
NIQSWSNHSWNTQTWCTQSWNNQAWNSPFYNCGEESLQSCMQFQPNSPASDLEAALEAAGEGLNVIQQTTGWRRATRSFR

SEQ ID NO: 26609 - protein, 80 aa, Synthetic construct
NNQAWNSPFYNCGEESLQSCMQFQPNSPASDLEAALEAAGEGLNVIQQTTRYFSTPQTMDLFLNYSMNMQGWRRATRSFR

SEQ ID NO: 26610 - protein, 80 aa, Synthetic construct
NTQAWNSPFYNCGEESLQSCMQFQPNSPASDLEAALEAAGEGLNVIQQTTRYFSTPQTMDLFLNYSMNMQGWRRATRSFR

SEQ ID NO: 26611 - protein, 80 aa, Synthetic construct
NTQTWNSPFYNCGEESLQSCMQFQPNSPASDLEAALEAAGEGLNVIQQTTRYFSTPQTMDLFLNYSMNMQGWRRATRSFR

SEQ ID NO: 26612 - protein, 80 aa, Synthetic construct
NTQTWCSPFYNCGEESLQSCMQFQPNSPASDLEAALEAAGEGLNVIQQTTRYFSTPQTMDLFLNYSMNMQGWRRATRSFR

SEQ ID NO: 26613 - protein, 80 aa, Synthetic construct
NTQTWCTQFYNCGEESLQSCMQFQPNSPASDLEAALEAAGEGLNVIQQTTRYFSTPQTMDLFLNYSMNMQGWRRATRSFR

SEQ ID NO: 26614 - protein, 80 aa, Synthetic construct
NTQTWCTQSWNCGEESLQSCMQFQPNSPASDLEAALEAAGEGLNVIQQTTRYFSTPQTMDLFLNYSMNMQGWRRATRSFR

SEQ ID NO: 26615 - protein, 80 aa, Synthetic construct
NTQTWCTQSWNNGEESLQSCMQFQPNSPASDLEAALEAAGEGLNVIQQTTRYFSTPQTMDLFLNYSMNMQGWRRATRSFR

SEQ ID NO: 26616 - protein, 80 aa, Synthetic construct
NTQTWCTQSWNNQAESLQSCMQFQPNSPASDLEAALEAAGEGLNVIQQTTRYFSTPQTMDLFLNYSMNMQGWRRATRSFR

SEQ ID NO: 26617 - protein, 80 aa, Synthetic construct
NTQTWCTQSWNNQAWNLQSCMQFQPNSPASDLEAALEAAGEGLNVIQQTTRYFSTPQTMDLFLNYSMNMQGWRRATRSFR

SEQ ID NO: 26618 - protein, 80 aa, Synthetic construct
NTQTWCTQSWNNQAWNSPSCMQFQPNSPASDLEAALEAAGEGLNVIQQTTRYFSTPQTMDLFLNYSMNMQGWRRATRSFR

SEQ ID NO: 26619 - protein, 80 aa, Synthetic construct
NTQTWCTQSWNNQAWNSPFYNCFQPNSPASDLEAALEAAGEGLNVIQQTTRYFSTPQTMDLFLNYSMNMQGWRRATRSFR

SEQ ID NO: 26620 - protein, 80 aa, Synthetic construct
NTQTWCTQSWNNQAWNSPFYNCGEPNSPASDLEAALEAAGEGLNVIQQTTRYFSTPQTMDLFLNYSMNMQGWRRATRSFR

SEQ ID NO: 26621 - protein, 80 aa, Synthetic construct
NTQTWCTQSWNNQAWNSPFYNCGEESSPASDLEAALEAAGEGLNVIQQTTRYFSTPQTMDLFLNYSMNMQGWRRATRSFR

SEQ ID NO: 26622 - protein, 80 aa, Synthetic construct
NTQTWCTQSWNNQAWNSPFYNCGEESLQASDLEAALEAAGEGLNVIQQTTRYFSTPQTMDLFLNYSMNMQGWRRATRSFR

SEQ ID NO: 26623 - protein, 80 aa, Synthetic construct
NTQTWCTQSWNNQAWNSPFYNCGEESLQSCMQEAALEAAGEGLNVIQQTTRYFSTPQTMDLFLNYSMNMQGWRRATRSFR

SEQ ID NO: 26624 - protein, 80 aa, Synthetic construct
NTQTWCTQSWNNQAWNSPFYNCGEESLQSCMQFQALEAAGEGLNVIQQTTRYFSTPQTMDLFLNYSMNMQGWRRATRSFR

SEQ ID NO: 26625 - protein, 80 aa, Synthetic construct
NTQTWCTQSWNNQAWNSPFYNCGEESLQSCMQFQPNEAAGEGLNVIQQTTRYFSTPQTMDLFLNYSMNMQGWRRATRSFR

SEQ ID NO: 26626 - protein, 80 aa, Synthetic construct
NTQTWCTQSWNNQAWNSPFYNCGEESLQSCMQFQPNSPAGEGLNVIQQTTRYFSTPQTMDLFLNYSMNMQGWRRATRSFR

SEQ ID NO: 26627 - protein, 80 aa, Synthetic construct
NTQTWCTQSWNNQAWNSPFYNCGEESLQSCMQFQPNSPASEGLNVIQQTTRYFSTPQTMDLFLNYSMNMQGWRRATRSFR

SEQ ID NO: 26628 - protein, 80 aa, Synthetic construct
NTQTWCTQSWNNQAWNSPFYNCGEESLQSCMQFQPNSPASDLEAALEAAGEGFSTPQTMDLFLNYSMNMQGWRRATRSFR

SEQ ID NO: 26629 - protein, 80 aa, Synthetic construct
NTQTWCTQSWNNQAWNSPFYNCGEESLQSCMQFQPNSPASDLEAALEAAGEGLNTPQTMDLFLNYSMNMQGWRRATRSFR

SEQ ID NO: 26630 - protein, 80 aa, Synthetic construct
NTQTWCTQSWNNQAWNSPFYNCGEESLQSCMQFQPNSPASDLEAALEAAGEGLNVIQQTTLFLNYSMNMQGWRRATRSFR

SEQ ID NO: 26631 - protein, 80 aa, Synthetic construct
NTQTWCTQSWNNQAWNSPFYNCGEESLQSCMQFQPNSPASDLEAALEAAGEGLNVIQQTTRYLNYSMNMQGWRRATRSFR

SEQ ID NO: 26632 - protein, 80 aa, Synthetic construct
NTQTWCTQSWNNQAWNSPFYNCGEESLQSCMQFQPNSPASDLEAALEAAGEGLNVIQQTTRYFSYSMNMQGWRRATRSFR

SEQ ID NO: 26633 - protein, 80 aa, Synthetic construct
NTQTWCTQSWNNQAWNSPFYNCGEESLQSCMQFQPNSPASDLEAALEAAGEGLNVIQQTTRYFSTPMNMQGWRRATRSFR

SEQ ID NO: 26634 - protein, 80 aa, Synthetic construct
NTQTWCTQSWNNQAWNSPFYNCGEESLQSCMQFQPNSPASDLEAALEAAGEGLNVIQQTTRYFSTPQTMQGWRRATRSFR

SEQ ID NO: 26635 - protein, 80 aa, Synthetic construct
WNSPFYNCGEESLQSCMQFQPNSPASDLEAALEAAGEGLNVIQQTTRYFSTPQTMDLFLNYSMNMQPEDVGWRRATRSFR

SEQ ID NO: 26636 - protein, 80 aa, Synthetic construct
WCSPFYNCGEESLQSCMQFQPNSPASDLEAALEAAGEGLNVIQQTTRYFSTPQTMDLFLNYSMNMQPEDVGWRRATRSFR

SEQ ID NO: 26637 - protein, 80 aa, Synthetic construct
WCTQFYNCGEESLQSCMQFQPNSPASDLEAALEAAGEGLNVIQQTTRYFSTPQTMDLFLNYSMNMQPEDVGWRRATRSFR

SEQ ID NO: 26638 - protein, 80 aa, Synthetic construct
WCTQSWNCGEESLQSCMQFQPNSPASDLEAALEAAGEGLNVIQQTTRYFSTPQTMDLFLNYSMNMQPEDVGWRRATRSFR

SEQ ID NO: 26639 - protein, 80 aa, Synthetic construct
WCTQSWNNGEESLQSCMQFQPNSPASDLEAALEAAGEGLNVIQQTTRYFSTPQTMDLFLNYSMNMQPEDVGWRRATRSFR

SEQ ID NO: 26640 - protein, 80 aa, Synthetic construct
WCTQSWNNQAESLQSCMQFQPNSPASDLEAALEAAGEGLNVIQQTTRYFSTPQTMDLFLNYSMNMQPEDVGWRRATRSFR

SEQ ID NO: 26641 - protein, 80 aa, Synthetic construct
WCTQSWNNQAWNLQSCMQFQPNSPASDLEAALEAAGEGLNVIQQTTRYFSTPQTMDLFLNYSMNMQPEDVGWRRATRSFR

SEQ ID NO: 26642 - protein, 80 aa, Synthetic construct
WCTQSWNNQAWNSPSCMQFQPNSPASDLEAALEAAGEGLNVIQQTTRYFSTPQTMDLFLNYSMNMQPEDVGWRRATRSFR

SEQ ID NO: 26643 - protein, 80 aa, Synthetic construct
WCTQSWNNQAWNSPFYNCGEPNSPASDLEAALEAAGEGLNVIQQTTRYFSTPQTMDLFLNYSMNMQPEDVGWRRATRSFR

SEQ ID NO: 26644 - protein, 80 aa, Synthetic construct
WCTQSWNNQAWNSPFYNCGEESSPASDLEAALEAAGEGLNVIQQTTRYFSTPQTMDLFLNYSMNMQPEDVGWRRATRSFR

SEQ ID NO: 26645 - protein, 80 aa, Synthetic construct
WCTQSWNNQAWNSPFYNCGEESLQSCMQEAALEAAGEGLNVIQQTTRYFSTPQTMDLFLNYSMNMQPEDVGWRRATRSFR

SEQ ID NO: 26646 - protein, 80 aa, Synthetic construct
WCTQSWNNQAWNSPFYNCGEESLQSCMQFQPNEAAGEGLNVIQQTTRYFSTPQTMDLFLNYSMNMQPEDVGWRRATRSFR

SEQ ID NO: 26647 - protein, 80 aa, Synthetic construct
WCTQSWNNQAWNSPFYNCGEESLQSCMQFQPNSPASDLEAALEAAGEGFSTPQTMDLFLNYSMNMQPEDVGWRRATRSFR

SEQ ID NO: 26648 - protein, 80 aa, Synthetic construct
WCTQSWNNQAWNSPFYNCGEESLQSCMQFQPNSPASDLEAALEAAGEGLNTPQTMDLFLNYSMNMQPEDVGWRRATRSFR

SEQ ID NO: 26649 - protein, 80 aa, Synthetic construct
WCTQSWNNQAWNSPFYNCGEESLQSCMQFQPNSPASDLEAALEAAGEGLNVIQQTTLFLNYSMNMQPEDVGWRRATRSFR

SEQ ID NO: 26650 - protein, 80 aa, Synthetic construct
WCTQSWNNQAWNSPFYNCGEESLQSCMQFQPNSPASDLEAALEAAGEGLNVIQQTTRYLNYSMNMQPEDVGWRRATRSFR

SEQ ID NO: 26651 - protein, 80 aa, Synthetic construct
WCTQSWNNQAWNSPFYNCGEESLQSCMQFQPNSPASDLEAALEAAGEGLNVIQQTTRYFSYSMNMQPEDVGWRRATRSFR

SEQ ID NO: 26652 - protein, 80 aa, Synthetic construct
WCTQSWNNQAWNSPFYNCGEESLQSCMQFQPNSPASDLEAALEAAGEGLNVIQQTTRYFSTPMNMQPEDVGWRRATRSFR

SEQ ID NO: 26653 - protein, 80 aa, Synthetic construct
WCTQSWNNQAWNSPFYNCGEESLQSCMQFQPNSPASDLEAALEAAGEGLNVIQQTTRYFSTPQTMQPEDVGWRRATRSFR

SEQ ID NO: 26654 - protein, 80 aa, Synthetic construct
WCTQSWNNQAWNSPFYNCGEESLQSCMQFQPNSPASDLEAALEAAGEGLNVIQQTTRYFSTPQTMDPEDVGWRRATRSFR

SEQ ID NO: 26655 - protein, 80 aa, Synthetic construct
WCTQSWNNQAWNSPFYNCGEESLQSCMQFQPNSPASDLEAALEAAGEGLNVIQQTTRYFSTPQTMDLFDVGWRRATRSFR

SEQ ID NO: 26656 - protein, 80 aa, Synthetic construct
WCTQSWNNQAWNSPFYNCGEESLQSCMQFQPNSPASDLEAALEAAGEGLNVIQQTTRYFSTPQTMDLFLNGWRRATRSFR

SEQ ID NO: 26657 - protein, 80 aa, Synthetic construct
IMKNLGIDFEDIRHMQNEKFFRNDFSGEVDFRDIDLTDEILTYVQDSLSKSPFIPSDYQQQQSLALNSSCGWRRATRSFR

SEQ ID NO: 26658 - protein, 80 aa, Synthetic construct
QDKNLGIDFEDIRHMQNEKFFRNDFSGEVDFRDIDLTDEILTYVQDSLSKSPFIPSDYQQQQSLALNSSCGWRRATRSFR

SEQ ID NO: 26659 - protein, 80 aa, Synthetic construct
QDSKLGIDFEDIRHMQNEKFFRNDFSGEVDFRDIDLTDEILTYVQDSLSKSPFIPSDYQQQQSLALNSSCGWRRATRSFR

SEQ ID NO: 26660 - protein, 80 aa, Synthetic construct
QDSKNSIDFEDIRHMQNEKFFRNDFSGEVDFRDIDLTDEILTYVQDSLSKSPFIPSDYQQQQSLALNSSCGWRRATRSFR

SEQ ID NO: 26661 - protein, 80 aa, Synthetic construct
QDSKNSDLFEDIRHMQNEKFFRNDFSGEVDFRDIDLTDEILTYVQDSLSKSPFIPSDYQQQQSLALNSSCGWRRATRSFR

SEQ ID NO: 26662 - protein, 80 aa, Synthetic construct
QDSKNSDLYSDIRHMQNEKFFRNDFSGEVDFRDIDLTDEILTYVQDSLSKSPFIPSDYQQQQSLALNSSCGWRRATRSFR

SEQ ID NO: 26663 - protein, 80 aa, Synthetic construct
QDSKNSDLYSIMKNLGNEKFFRNDFSGEVDFRDIDLTDEILTYVQDSLSKSPFIPSDYQQQQSLALNSSCGWRRATRSFR

SEQ ID NO: 26664 - protein, 80 aa, Synthetic construct
QDSKNSDLYSIMKNLGIDFEFRNDFSGEVDFRDIDLTDEILTYVQDSLSKSPFIPSDYQQQQSLALNSSCGWRRATRSFR

SEQ ID NO: 26665 - protein, 80 aa, Synthetic construct
QDSKNSDLYSIMKNLGIDFEDINDFSGEVDFRDIDLTDEILTYVQDSLSKSPFIPSDYQQQQSLALNSSCGWRRATRSFR

SEQ ID NO: 26666 - protein, 80 aa, Synthetic construct
QDSKNSDLYSIMKNLGIDFEDIRHMQNEVDFRDIDLTDEILTYVQDSLSKSPFIPSDYQQQQSLALNSSCGWRRATRSFR

SEQ ID NO: 26667 - protein, 80 aa, Synthetic construct
QDSKNSDLYSIMKNLGIDFEDIRHMQNEKFFRNDDLTDEILTYVQDSLSKSPFIPSDYQQQQSLALNSSCGWRRATRSFR

SEQ ID NO: 26668 - protein, 80 aa, Synthetic construct
QDSKNSDLYSIMKNLGIDFEDIRHMQNEKFFRNDFSGEVDFRDIDLTDEISPFIPSDYQQQQSLALNSSCGWRRATRSFR

SEQ ID NO: 26669 - protein, 80 aa, Synthetic construct
QDSKNSDLYSIMKNLGIDFEDIRHMQNEKFFRNDFSGEVDFRDIDLTDEILTFIPSDYQQQQSLALNSSCGWRRATRSFR

SEQ ID NO: 26670 - protein, 80 aa, Synthetic construct
QDSKNSDLYSIMKNLGIDFEDIRHMQNEKFFRNDFSGEVDFRDIDLTDEILTYVPSDYQQQQSLALNSSCGWRRATRSFR

SEQ ID NO: 26671 - protein, 80 aa, Synthetic construct
QDSKNSDLYSIMKNLGIDFEDIRHMQNEKFFRNDFSGEVDFRDIDLTDEILTYVQDDYQQQQSLALNSSCGWRRATRSFR

SEQ ID NO: 26672 - protein, 80 aa, Synthetic construct
QDSKNSDLYSIMKNLGIDFEDIRHMQNEKFFRNDFSGEVDFRDIDLTDEILTYVQDSLQQQQSLALNSSCGWRRATRSFR

SEQ ID NO: 26673 - protein, 80 aa, Synthetic construct
QDSKNSDLYSIMKNLGIDFEDIRHMQNEKFFRNDFSGEVDFRDIDLTDEILTYVQDSLSKQQSLALNSSCGWRRATRSFR

SEQ ID NO: 26674 - protein, 80 aa, Synthetic construct
QDSKNSDLYSIMKNLGIDFEDIRHMQNEKFFRNDFSGEVDFRDIDLTDEILTYVQDSLSKSPSLALNSSCGWRRATRSFR

SEQ ID NO: 26675 - protein, 80 aa, Synthetic construct
QDSKNSDLYSIMKNLGIDFEDIRHMQNEKFFRNDFSGEVDFRDIDLTDEILTYVQDSLSKSPFIPSNSSCGWRRATRSFR

SEQ ID NO: 26676 - protein, 80 aa, Synthetic construct
QDSKNSDLYSIMKNLGIDFEDIRHMQNEKFFRNDFSGEVDFRDIDLTDEILTYVQDSLSKSPFIPSDYSCGWRRATRSFR

SEQ ID NO: 26677 - protein, 80 aa, Synthetic construct
QDSKNSDLYSIMKNLGIDFEDIRHMQNEKFFRNDFSGEVDFRDIDLTDEILTYVQDSLSKSPFIPSDYQQGWRRATRSFR

SEQ ID NO: 26678 - protein, 80 aa, Synthetic construct
DIRHMQNEKFFRNDFSGEVDFRDIDLTDEILTYVQDSLSKSPFIPSDYQQQQSLALNSSCMVQEHLHLEQGWRRATRSFR

SEQ ID NO: 26679 - protein, 80 aa, Synthetic construct
IMRHMQNEKFFRNDFSGEVDFRDIDLTDEILTYVQDSLSKSPFIPSDYQQQQSLALNSSCMVQEHLHLEQGWRRATRSFR

SEQ ID NO: 26680 - protein, 80 aa, Synthetic construct
IMKNMQNEKFFRNDFSGEVDFRDIDLTDEILTYVQDSLSKSPFIPSDYQQQQSLALNSSCMVQEHLHLEQGWRRATRSFR

SEQ ID NO: 26681 - protein, 80 aa, Synthetic construct
IMKNLGNEKFFRNDFSGEVDFRDIDLTDEILTYVQDSLSKSPFIPSDYQQQQSLALNSSCMVQEHLHLEQGWRRATRSFR

SEQ ID NO: 26682 - protein, 80 aa, Synthetic construct
IMKNLGIDKFFRNDFSGEVDFRDIDLTDEILTYVQDSLSKSPFIPSDYQQQQSLALNSSCMVQEHLHLEQGWRRATRSFR

SEQ ID NO: 26683 - protein, 80 aa, Synthetic construct
IMKNLGIDFEFRNDFSGEVDFRDIDLTDEILTYVQDSLSKSPFIPSDYQQQQSLALNSSCMVQEHLHLEQGWRRATRSFR

SEQ ID NO: 26684 - protein, 80 aa, Synthetic construct
IMKNLGIDFEDINDFSGEVDFRDIDLTDEILTYVQDSLSKSPFIPSDYQQQQSLALNSSCMVQEHLHLEQGWRRATRSFR

SEQ ID NO: 26685 - protein, 80 aa, Synthetic construct
IMKNLGIDFEDIRHFSGEVDFRDIDLTDEILTYVQDSLSKSPFIPSDYQQQQSLALNSSCMVQEHLHLEQGWRRATRSFR

SEQ ID NO: 26686 - protein, 80 aa, Synthetic construct
IMKNLGIDFEDIRHMQGEVDFRDIDLTDEILTYVQDSLSKSPFIPSDYQQQQSLALNSSCMVQEHLHLEQGWRRATRSFR

SEQ ID NO: 26687 - protein, 80 aa, Synthetic construct
IMKNLGIDFEDIRHMQNEVDFRDIDLTDEILTYVQDSLSKSPFIPSDYQQQQSLALNSSCMVQEHLHLEQGWRRATRSFR

SEQ ID NO: 26688 - protein, 80 aa, Synthetic construct
IMKNLGIDFEDIRHMQNEKFFRDIDLTDEILTYVQDSLSKSPFIPSDYQQQQSLALNSSCMVQEHLHLEQGWRRATRSFR

SEQ ID NO: 26689 - protein, 80 aa, Synthetic construct
IMKNLGIDFEDIRHMQNEKFFRNDFSGEVDFRDIDLTDEILTFIPSDYQQQQSLALNSSCMVQEHLHLEQGWRRATRSFR

SEQ ID NO: 26690 - protein, 80 aa, Synthetic construct
IMKNLGIDFEDIRHMQNEKFFRNDFSGEVDFRDIDLTDEILTYVPSDYQQQQSLALNSSCMVQEHLHLEQGWRRATRSFR

SEQ ID NO: 26691 - protein, 80 aa, Synthetic construct
IMKNLGIDFEDIRHMQNEKFFRNDFSGEVDFRDIDLTDEILTYVQDDYQQQQSLALNSSCMVQEHLHLEQGWRRATRSFR

SEQ ID NO: 26692 - protein, 80 aa, Synthetic construct
IMKNLGIDFEDIRHMQNEKFFRNDFSGEVDFRDIDLTDEILTYVQDSLQQQQSLALNSSCMVQEHLHLEQGWRRATRSFR

SEQ ID NO: 26693 - protein, 80 aa, Synthetic construct
IMKNLGIDFEDIRHMQNEKFFRNDFSGEVDFRDIDLTDEILTYVQDSLSKQQSLALNSSCMVQEHLHLEQGWRRATRSFR

SEQ ID NO: 26694 - protein, 80 aa, Synthetic construct
IMKNLGIDFEDIRHMQNEKFFRNDFSGEVDFRDIDLTDEILTYVQDSLSKSPSLALNSSCMVQEHLHLEQGWRRATRSFR

SEQ ID NO: 26695 - protein, 80 aa, Synthetic construct
IMKNLGIDFEDIRHMQNEKFFRNDFSGEVDFRDIDLTDEILTYVQDSLSKSPFIALNSSCMVQEHLHLEQGWRRATRSFR

SEQ ID NO: 26696 - protein, 80 aa, Synthetic construct
IMKNLGIDFEDIRHMQNEKFFRNDFSGEVDFRDIDLTDEILTYVQDSLSKSPFIPSNSSCMVQEHLHLEQGWRRATRSFR

SEQ ID NO: 26697 - protein, 80 aa, Synthetic construct
IMKNLGIDFEDIRHMQNEKFFRNDFSGEVDFRDIDLTDEILTYVQDSLSKSPFIPSDYSCMVQEHLHLEQGWRRATRSFR

SEQ ID NO: 26698 - protein, 80 aa, Synthetic construct
IMKNLGIDFEDIRHMQNEKFFRNDFSGEVDFRDIDLTDEILTYVQDSLSKSPFIPSDYQQMVQEHLHLEQGWRRATRSFR

SEQ ID NO: 26699 - protein, 80 aa, Synthetic construct
IMKNLGIDFEDIRHMQNEKFFRNDFSGEVDFRDIDLTDEILTYVQDSLSKSPFIPSDYQQQQQEHLHLEQGWRRATRSFR

SEQ ID NO: 26700 - protein, 80 aa, Synthetic construct
IMKNLGIDFEDIRHMQNEKFFRNDFSGEVDFRDIDLTDEILTYVQDSLSKSPFIPSDYQQQQSLHLHLEQGWRRATRSFR

SEQ ID NO: 26701 - protein, 80 aa, Synthetic construct
IMKNLGIDFEDIRHMQNEKFFRNDFSGEVDFRDIDLTDEILTYVQDSLSKSPFIPSDYQQQQSLALHLEQGWRRATRSFR

SEQ ID NO: 26702 - protein, 80 aa, Synthetic construct
IMKNLGIDFEDIRHMQNEKFFRNDFSGEVDFRDIDLTDEILTYVQDSLSKSPFIPSDYQQQQSLALNSEQGWRRATRSFR

SEQ ID NO: 26703 - protein, 80 aa, Synthetic construct
LLEQLVLAELDRALGIDKLVQGGGLDVLSERFPPQQATPPLIMEERPNLYSQPYSSPSPTANLPSPFQGMGWRRATRSFR

SEQ ID NO: 26704 - protein, 80 aa, Synthetic construct
LLEQLVSFLSGKDETELAELDRALGIDKLVRFPPQQATPPLIMEERPNLYSQPYSSPSPTANLPSPFQGMGWRRATRSFR

SEQ ID NO: 26705 - protein, 80 aa, Synthetic construct
LLEQLVSFLSGKDETELAELDRALGIDKLVQGPPQQATPPLIMEERPNLYSQPYSSPSPTANLPSPFQGMGWRRATRSFR

SEQ ID NO: 26706 - protein, 80 aa, Synthetic construct
LLEQLVSFLSGKDETELAELDRALGIDKLVQGGGQQATPPLIMEERPNLYSQPYSSPSPTANLPSPFQGMGWRRATRSFR

SEQ ID NO: 26707 - protein, 80 aa, Synthetic construct
LLEQLVSFLSGKDETELAELDRALGIDKLVQGGGLDATPPLIMEERPNLYSQPYSSPSPTANLPSPFQGMGWRRATRSFR

SEQ ID NO: 26708 - protein, 80 aa, Synthetic construct
LLEQLVSFLSGKDETELAELDRALGIDKLVQGGGLDVLPPLIMEERPNLYSQPYSSPSPTANLPSPFQGMGWRRATRSFR

SEQ ID NO: 26709 - protein, 80 aa, Synthetic construct
LLEQLVSFLSGKDETELAELDRALGIDKLVQGGGLDVLSELIMEERPNLYSQPYSSPSPTANLPSPFQGMGWRRATRSFR

SEQ ID NO: 26710 - protein, 80 aa, Synthetic construct
LLEQLVSFLSGKDETELAELDRALGIDKLVQGGGLDVLSERFMEERPNLYSQPYSSPSPTANLPSPFQGMGWRRATRSFR

SEQ ID NO: 26711 - protein, 80 aa, Synthetic construct
LLEQLVSFLSGKDETELAELDRALGIDKLVQGGGLDVLSERFPPERPNLYSQPYSSPSPTANLPSPFQGMGWRRATRSFR

SEQ ID NO: 26712 - protein, 80 aa, Synthetic construct
LLEQLVSFLSGKDETELAELDRALGIDKLVQGGGLDVLSERFPPQQPNLYSQPYSSPSPTANLPSPFQGMGWRRATRSFR

SEQ ID NO: 26713 - protein, 80 aa, Synthetic construct
LLEQLVSFLSGKDETELAELDRALGIDKLVQGGGLDVLSERFPPQQATLYSQPYSSPSPTANLPSPFQGMGWRRATRSFR

SEQ ID NO: 26714 - protein, 80 aa, Synthetic construct
LLEQLVSFLSGKDETELAELDRALGIDKLVQGGGLDVLSERFPPQQATPPSQPYSSPSPTANLPSPFQGMGWRRATRSFR

SEQ ID NO: 26715 - protein, 80 aa, Synthetic construct
LLEQLVSFLSGKDETELAELDRALGIDKLVQGGGLDVLSERFPPQQATPPLIPYSSPSPTANLPSPFQGMGWRRATRSFR

SEQ ID NO: 26716 - protein, 80 aa, Synthetic construct
LLEQLVSFLSGKDETELAELDRALGIDKLVQGGGLDVLSERFPPQQATPPLIMESSPSPTANLPSPFQGMGWRRATRSFR

SEQ ID NO: 26717 - protein, 80 aa, Synthetic construct
LLEQLVSFLSGKDETELAELDRALGIDKLVQGGGLDVLSERFPPQQATPPLIMEERPSPTANLPSPFQGMGWRRATRSFR

SEQ ID NO: 26718 - protein, 80 aa, Synthetic construct
LLEQLVSFLSGKDETELAELDRALGIDKLVQGGGLDVLSERFPPQQATPPLIMEERPNPTANLPSPFQGMGWRRATRSFR

SEQ ID NO: 26719 - protein, 80 aa, Synthetic construct
LLEQLVSFLSGKDETELAELDRALGIDKLVQGGGLDVLSERFPPQQATPPLIMEERPNLYANLPSPFQGMGWRRATRSFR

SEQ ID NO: 26720 - protein, 80 aa, Synthetic construct
LLEQLVSFLSGKDETELAELDRALGIDKLVQGGGLDVLSERFPPQQATPPLIMEERPNLYSQLPSPFQGMGWRRATRSFR

SEQ ID NO: 26721 - protein, 80 aa, Synthetic construct
LLEQLVSFLSGKDETELAELDRALGIDKLVQGGGLDVLSERFPPQQATPPLIMEERPNLYSQPYSPFQGMGWRRATRSFR

SEQ ID NO: 26722 - protein, 80 aa, Synthetic construct
LLEQLVSFLSGKDETELAELDRALGIDKLVQGGGLDVLSERFPPQQATPPLIMEERPNLYSQPYSSFQGMGWRRATRSFR

SEQ ID NO: 26723 - protein, 80 aa, Synthetic construct
LLEQLVSFLSGKDETELAELDRALGIDKLVQGGGLDVLSERFPPQQATPPLIMEERPNLYSQPYSSPSGMGWRRATRSFR

SEQ ID NO: 26724 - protein, 80 aa, Synthetic construct
LLEQLVSFLSGKDETELAELDRALGIDKLVQGGGLDVLSERFPPQQATPPLIMEERPNLYSQPYSSPSPTGWRRATRSFR

SEQ ID NO: 26725 - protein, 80 aa, Synthetic construct
SSLVQDDDMLYWHKHGDGWKTPVPMEEDPLLDTDMLMSEFSDTLFSTLSSHQPVAWPNPREIAHLGNADMGWRRATRSFR

SEQ ID NO: 26726 - protein, 80 aa, Synthetic construct
RLLVQDDDMLYWHKHGDGWKTPVPMEEDPLLDTDMLMSEFSDTLFSTLSSHQPVAWPNPREIAHLGNADMGWRRATRSFR

SEQ ID NO: 26727 - protein, 80 aa, Synthetic construct
RLQQQDDDMLYWHKHGDGWKTPVPMEEDPLLDTDMLMSEFSDTLFSTLSSHQPVAWPNPREIAHLGNADMGWRRATRSFR

SEQ ID NO: 26728 - protein, 80 aa, Synthetic construct
RLQQHKDDMLYWHKHGDGWKTPVPMEEDPLLDTDMLMSEFSDTLFSTLSSHQPVAWPNPREIAHLGNADMGWRRATRSFR

SEQ ID NO: 26729 - protein, 80 aa, Synthetic construct
RLQQHKDEMLYWHKHGDGWKTPVPMEEDPLLDTDMLMSEFSDTLFSTLSSHQPVAWPNPREIAHLGNADMGWRRATRSFR

SEQ ID NO: 26730 - protein, 80 aa, Synthetic construct
RLQQHKDEDLYWHKHGDGWKTPVPMEEDPLLDTDMLMSEFSDTLFSTLSSHQPVAWPNPREIAHLGNADMGWRRATRSFR

SEQ ID NO: 26731 - protein, 80 aa, Synthetic construct
RLQQHKDEDLSSLVHGDGWKTPVPMEEDPLLDTDMLMSEFSDTLFSTLSSHQPVAWPNPREIAHLGNADMGWRRATRSFR

SEQ ID NO: 26732 - protein, 80 aa, Synthetic construct
RLQQHKDEDLSSLVQDDGWKTPVPMEEDPLLDTDMLMSEFSDTLFSTLSSHQPVAWPNPREIAHLGNADMGWRRATRSFR

SEQ ID NO: 26733 - protein, 80 aa, Synthetic construct
RLQQHKDEDLSSLVQDDDWKTPVPMEEDPLLDTDMLMSEFSDTLFSTLSSHQPVAWPNPREIAHLGNADMGWRRATRSFR

SEQ ID NO: 26734 - protein, 80 aa, Synthetic construct
RLQQHKDEDLSSLVQDDDMLTPVPMEEDPLLDTDMLMSEFSDTLFSTLSSHQPVAWPNPREIAHLGNADMGWRRATRSFR

SEQ ID NO: 26735 - protein, 80 aa, Synthetic construct
RLQQHKDEDLSSLVQDDDMLYWHKHGEDPLLDTDMLMSEFSDTLFSTLSSHQPVAWPNPREIAHLGNADMGWRRATRSFR

SEQ ID NO: 26736 - protein, 80 aa, Synthetic construct
RLQQHKDEDLSSLVQDDDMLYWHKHGDGPLLDTDMLMSEFSDTLFSTLSSHQPVAWPNPREIAHLGNADMGWRRATRSFR

SEQ ID NO: 26737 - protein, 80 aa, Synthetic construct
RLQQHKDEDLSSLVQDDDMLYWHKHGDGWKLDTDMLMSEFSDTLFSTLSSHQPVAWPNPREIAHLGNADMGWRRATRSFR

SEQ ID NO: 26738 - protein, 80 aa, Synthetic construct
RLQQHKDEDLSSLVQDDDMLYWHKHGDGWKTPTDMLMSEFSDTLFSTLSSHQPVAWPNPREIAHLGNADMGWRRATRSFR

SEQ ID NO: 26739 - protein, 80 aa, Synthetic construct
RLQQHKDEDLSSLVQDDDMLYWHKHGDGWKTPVPMEEDPLLDTLFSTLSSHQPVAWPNPREIAHLGNADMGWRRATRSFR

SEQ ID NO: 26740 - protein, 80 aa, Synthetic construct
RLQQHKDEDLSSLVQDDDMLYWHKHGDGWKTPVPMEEDPLLDTDMLMSEFSDPVAWPNPREIAHLGNADMGWRRATRSFR

SEQ ID NO: 26741 - protein, 80 aa, Synthetic construct
RLQQHKDEDLSSLVQDDDMLYWHKHGDGWKTPVPMEEDPLLDTDMLMSEFSDTLAWPNPREIAHLGNADMGWRRATRSFR

SEQ ID NO: 26742 - protein, 80 aa, Synthetic construct
RLQQHKDEDLSSLVQDDDMLYWHKHGDGWKTPVPMEEDPLLDTDMLMSEFSDTLFSPNPREIAHLGNADMGWRRATRSFR

SEQ ID NO: 26743 - protein, 80 aa, Synthetic construct
RLQQHKDEDLSSLVQDDDMLYWHKHGDGWKTPVPMEEDPLLDTDMLMSEFSDTLFSTLPREIAHLGNADMGWRRATRSFR

SEQ ID NO: 26744 - protein, 80 aa, Synthetic construct
RLQQHKDEDLSSLVQDDDMLYWHKHGDGWKTPVPMEEDPLLDTDMLMSEFSDTLFSTLSSEIAHLGNADMGWRRATRSFR

SEQ ID NO: 26745 - protein, 80 aa, Synthetic construct
RLQQHKDEDLSSLVQDDDMLYWHKHGDGWKTPVPMEEDPLLDTDMLMSEFSDTLFSTLSSHQAHLGNADMGWRRATRSFR

SEQ ID NO: 26746 - protein, 80 aa, Synthetic construct
RLQQHKDEDLSSLVQDDDMLYWHKHGDGWKTPVPMEEDPLLDTDMLMSEFSDTLFSTLSSHQPVLGNADMGWRRATRSFR

SEQ ID NO: 26747 - protein, 80 aa, Synthetic construct
RLQQHKDEDLSSLVQDDDMLYWHKHGDGWKTPVPMEEDPLLDTDMLMSEFSDTLFSTLSSHQPVAWNADMGWRRATRSFR

SEQ ID NO: 26748 - protein, 80 aa, Synthetic construct
RLQQHKDEDLSSLVQDDDMLYWHKHGDGWKTPVPMEEDPLLDTDMLMSEFSDTLFSTLSSHQPVAWPNDMGWRRATRSFR

SEQ ID NO: 26749 - protein, 80 aa, Synthetic construct
RLQQHKDEDLSSLVQDDDMLYWHKHGDGWKTPVPMEEDPLLDTDMLMSEFSDTLFSTLSSHQPVAWPNPRGWRRATRSFR

SEQ ID NO: 26750 - protein, 80 aa, Synthetic construct
TPVPMEEDPLLDTDMLMSEFSDTLFSTLSSHQPVAWPNPREIAHLGNADMIQPGLIPLQPNLDFMDTFEPGWRRATRSFR

SEQ ID NO: 26751 - protein, 80 aa, Synthetic construct
YWHKHGEDPLLDTDMLMSEFSDTLFSTLSSHQPVAWPNPREIAHLGNADMIQPGLIPLQPNLDFMDTFEPGWRRATRSFR

SEQ ID NO: 26752 - protein, 80 aa, Synthetic construct
YWHKHGDGPLLDTDMLMSEFSDTLFSTLSSHQPVAWPNPREIAHLGNADMIQPGLIPLQPNLDFMDTFEPGWRRATRSFR

SEQ ID NO: 26753 - protein, 80 aa, Synthetic construct
YWHKHGDGWKTPTDMLMSEFSDTLFSTLSSHQPVAWPNPREIAHLGNADMIQPGLIPLQPNLDFMDTFEPGWRRATRSFR

SEQ ID NO: 26754 - protein, 80 aa, Synthetic construct
YWHKHGDGWKTPVPMLMSEFSDTLFSTLSSHQPVAWPNPREIAHLGNADMIQPGLIPLQPNLDFMDTFEPGWRRATRSFR

SEQ ID NO: 26755 - protein, 80 aa, Synthetic construct
YWHKHGDGWKTPVPMEMSEFSDTLFSTLSSHQPVAWPNPREIAHLGNADMIQPGLIPLQPNLDFMDTFEPGWRRATRSFR

SEQ ID NO: 26756 - protein, 80 aa, Synthetic construct
YWHKHGDGWKTPVPMEEDEFSDTLFSTLSSHQPVAWPNPREIAHLGNADMIQPGLIPLQPNLDFMDTFEPGWRRATRSFR

SEQ ID NO: 26757 - protein, 80 aa, Synthetic construct
YWHKHGDGWKTPVPMEEDPLSDTLFSTLSSHQPVAWPNPREIAHLGNADMIQPGLIPLQPNLDFMDTFEPGWRRATRSFR

SEQ ID NO: 26758 - protein, 80 aa, Synthetic construct
YWHKHGDGWKTPVPMEEDPLLDTLFSTLSSHQPVAWPNPREIAHLGNADMIQPGLIPLQPNLDFMDTFEPGWRRATRSFR

SEQ ID NO: 26759 - protein, 80 aa, Synthetic construct
YWHKHGDGWKTPVPMEEDPLLDTDMLMSEFHQPVAWPNPREIAHLGNADMIQPGLIPLQPNLDFMDTFEPGWRRATRSFR

SEQ ID NO: 26760 - protein, 80 aa, Synthetic construct
YWHKHGDGWKTPVPMEEDPLLDTDMLMSEFSDPVAWPNPREIAHLGNADMIQPGLIPLQPNLDFMDTFEPGWRRATRSFR

SEQ ID NO: 26761 - protein, 80 aa, Synthetic construct
YWHKHGDGWKTPVPMEEDPLLDTDMLMSEFSDTLAWPNPREIAHLGNADMIQPGLIPLQPNLDFMDTFEPGWRRATRSFR

SEQ ID NO: 26762 - protein, 80 aa, Synthetic construct
YWHKHGDGWKTPVPMEEDPLLDTDMLMSEFSDTLFSPNPREIAHLGNADMIQPGLIPLQPNLDFMDTFEPGWRRATRSFR

SEQ ID NO: 26763 - protein, 80 aa, Synthetic construct
YWHKHGDGWKTPVPMEEDPLLDTDMLMSEFSDTLFSTLPREIAHLGNADMIQPGLIPLQPNLDFMDTFEPGWRRATRSFR

SEQ ID NO: 26764 - protein, 80 aa, Synthetic construct
YWHKHGDGWKTPVPMEEDPLLDTDMLMSEFSDTLFSTLSSEIAHLGNADMIQPGLIPLQPNLDFMDTFEPGWRRATRSFR

SEQ ID NO: 26765 - protein, 80 aa, Synthetic construct
YWHKHGDGWKTPVPMEEDPLLDTDMLMSEFSDTLFSTLSSHQAHLGNADMIQPGLIPLQPNLDFMDTFEPGWRRATRSFR

SEQ ID NO: 26766 - protein, 80 aa, Synthetic construct
YWHKHGDGWKTPVPMEEDPLLDTDMLMSEFSDTLFSTLSSHQPVLGNADMIQPGLIPLQPNLDFMDTFEPGWRRATRSFR

SEQ ID NO: 26767 - protein, 80 aa, Synthetic construct
YWHKHGDGWKTPVPMEEDPLLDTDMLMSEFSDTLFSTLSSHQPVAWNADMIQPGLIPLQPNLDFMDTFEPGWRRATRSFR

SEQ ID NO: 26768 - protein, 80 aa, Synthetic construct
YWHKHGDGWKTPVPMEEDPLLDTDMLMSEFSDTLFSTLSSHQPVAWPNDMIQPGLIPLQPNLDFMDTFEPGWRRATRSFR

SEQ ID NO: 26769 - protein, 80 aa, Synthetic construct
YWHKHGDGWKTPVPMEEDPLLDTDMLMSEFSDTLFSTLSSHQPVAWPNPRIQPGLIPLQPNLDFMDTFEPGWRRATRSFR

SEQ ID NO: 26770 - protein, 80 aa, Synthetic construct
YWHKHGDGWKTPVPMEEDPLLDTDMLMSEFSDTLFSTLSSHQPVAWPNPREIPGLIPLQPNLDFMDTFEPGWRRATRSFR

SEQ ID NO: 26771 - protein, 80 aa, Synthetic construct
YWHKHGDGWKTPVPMEEDPLLDTDMLMSEFSDTLFSTLSSHQPVAWPNPREIAHLIPLQPNLDFMDTFEPGWRRATRSFR

SEQ ID NO: 26772 - protein, 80 aa, Synthetic construct
YWHKHGDGWKTPVPMEEDPLLDTDMLMSEFSDTLFSTLSSHQPVAWPNPREIAHLGPLQPNLDFMDTFEPGWRRATRSFR

SEQ ID NO: 26773 - protein, 80 aa, Synthetic construct
YWHKHGDGWKTPVPMEEDPLLDTDMLMSEFSDTLFSTLSSHQPVAWPNPREIAHLGNAQPNLDFMDTFEPGWRRATRSFR

SEQ ID NO: 26774 - protein, 80 aa, Synthetic construct
YWHKHGDGWKTPVPMEEDPLLDTDMLMSEFSDTLFSTLSSHQPVAWPNPREIAHLGNADMNLDFMDTFEPGWRRATRSFR

SEQ ID NO: 26775 - protein, 80 aa, Synthetic construct
YWHKHGDGWKTPVPMEEDPLLDTDMLMSEFSDTLFSTLSSHQPVAWPNPREIAHLGNADMIQDFMDTFEPGWRRATRSFR

SEQ ID NO: 26776 - protein, 80 aa, Synthetic construct
YWHKHGDGWKTPVPMEEDPLLDTDMLMSEFSDTLFSTLSSHQPVAWPNPREIAHLGNADMIQPGMDTFEPGWRRATRSFR

SEQ ID NO: 26777 - protein, 80 aa, Synthetic construct
YWHKHGDGWKTPVPMEEDPLLDTDMLMSEFSDTLFSTLSSHQPVAWPNPREIAHLGNADMIQPGLITFEPGWRRATRSFR

SEQ ID NO: 26778 - protein, 80 aa, Synthetic construct
YWHKHGDGWKTPVPMEEDPLLDTDMLMSEFSDTLFSTLSSHQPVAWPNPREIAHLGNADMIQPGLIPLEPGWRRATRSFR

SEQ ID NO: 26779 - protein, 80 aa, Synthetic construct
YWHKHGDGWKTPVPMEEDPLLDTDMLMSEFSDTLFSTLSSHQPVAWPNPREIAHLGNADMIQPGLIPLQPGWRRATRSFR

SEQ ID NO: 26780 - protein, 80 aa, Synthetic construct
LDTDMLMSEFSDTLFSTLSSHQPVAWPNPREIAHLGNADMIQPGLIPLQPNLDFMDTFEPFQDLFSSSRSGWRRATRSFR

SEQ ID NO: 26781 - protein, 80 aa, Synthetic construct
TPTDMLMSEFSDTLFSTLSSHQPVAWPNPREIAHLGNADMIQPGLIPLQPNLDFMDTFEPFQDLFSSSRSGWRRATRSFR

SEQ ID NO: 26782 - protein, 80 aa, Synthetic construct
TPVPMLMSEFSDTLFSTLSSHQPVAWPNPREIAHLGNADMIQPGLIPLQPNLDFMDTFEPFQDLFSSSRSGWRRATRSFR

SEQ ID NO: 26783 - protein, 80 aa, Synthetic construct
TPVPMEMSEFSDTLFSTLSSHQPVAWPNPREIAHLGNADMIQPGLIPLQPNLDFMDTFEPFQDLFSSSRSGWRRATRSFR

SEQ ID NO: 26784 - protein, 80 aa, Synthetic construct
TPVPMEEDEFSDTLFSTLSSHQPVAWPNPREIAHLGNADMIQPGLIPLQPNLDFMDTFEPFQDLFSSSRSGWRRATRSFR

SEQ ID NO: 26785 - protein, 80 aa, Synthetic construct
TPVPMEEDPLSDTLFSTLSSHQPVAWPNPREIAHLGNADMIQPGLIPLQPNLDFMDTFEPFQDLFSSSRSGWRRATRSFR

SEQ ID NO: 26786 - protein, 80 aa, Synthetic construct
TPVPMEEDPLLDTLFSTLSSHQPVAWPNPREIAHLGNADMIQPGLIPLQPNLDFMDTFEPFQDLFSSSRSGWRRATRSFR

SEQ ID NO: 26787 - protein, 80 aa, Synthetic construct
TPVPMEEDPLLDTDFSTLSSHQPVAWPNPREIAHLGNADMIQPGLIPLQPNLDFMDTFEPFQDLFSSSRSGWRRATRSFR

SEQ ID NO: 26788 - protein, 80 aa, Synthetic construct
TPVPMEEDPLLDTDMLTLSSHQPVAWPNPREIAHLGNADMIQPGLIPLQPNLDFMDTFEPFQDLFSSSRSGWRRATRSFR

SEQ ID NO: 26789 - protein, 80 aa, Synthetic construct
TPVPMEEDPLLDTDMLMSSSHQPVAWPNPREIAHLGNADMIQPGLIPLQPNLDFMDTFEPFQDLFSSSRSGWRRATRSFR

SEQ ID NO: 26790 - protein, 80 aa, Synthetic construct
TPVPMEEDPLLDTDMLMSEFHQPVAWPNPREIAHLGNADMIQPGLIPLQPNLDFMDTFEPFQDLFSSSRSGWRRATRSFR

SEQ ID NO: 26791 - protein, 80 aa, Synthetic construct
TPVPMEEDPLLDTDMLMSEFSDPVAWPNPREIAHLGNADMIQPGLIPLQPNLDFMDTFEPFQDLFSSSRSGWRRATRSFR

SEQ ID NO: 26792 - protein, 80 aa, Synthetic construct
TPVPMEEDPLLDTDMLMSEFSDTLAWPNPREIAHLGNADMIQPGLIPLQPNLDFMDTFEPFQDLFSSSRSGWRRATRSFR

SEQ ID NO: 26793 - protein, 80 aa, Synthetic construct
TPVPMEEDPLLDTDMLMSEFSDTLFSPNPREIAHLGNADMIQPGLIPLQPNLDFMDTFEPFQDLFSSSRSGWRRATRSFR

SEQ ID NO: 26794 - protein, 80 aa, Synthetic construct
TPVPMEEDPLLDTDMLMSEFSDTLFSTLPREIAHLGNADMIQPGLIPLQPNLDFMDTFEPFQDLFSSSRSGWRRATRSFR

SEQ ID NO: 26795 - protein, 80 aa, Synthetic construct
TPVPMEEDPLLDTDMLMSEFSDTLFSTLSSEIAHLGNADMIQPGLIPLQPNLDFMDTFEPFQDLFSSSRSGWRRATRSFR

SEQ ID NO: 26796 - protein, 80 aa, Synthetic construct
TPVPMEEDPLLDTDMLMSEFSDTLFSTLSSHQAHLGNADMIQPGLIPLQPNLDFMDTFEPFQDLFSSSRSGWRRATRSFR

SEQ ID NO: 26797 - protein, 80 aa, Synthetic construct
TPVPMEEDPLLDTDMLMSEFSDTLFSTLSSHQPVLGNADMIQPGLIPLQPNLDFMDTFEPFQDLFSSSRSGWRRATRSFR

SEQ ID NO: 26798 - protein, 80 aa, Synthetic construct
TPVPMEEDPLLDTDMLMSEFSDTLFSTLSSHQPVAWNADMIQPGLIPLQPNLDFMDTFEPFQDLFSSSRSGWRRATRSFR

SEQ ID NO: 26799 - protein, 80 aa, Synthetic construct
TPVPMEEDPLLDTDMLMSEFSDTLFSTLSSHQPVAWPNDMIQPGLIPLQPNLDFMDTFEPFQDLFSSSRSGWRRATRSFR

SEQ ID NO: 26800 - protein, 80 aa, Synthetic construct
TPVPMEEDPLLDTDMLMSEFSDTLFSTLSSHQPVAWPNPRIQPGLIPLQPNLDFMDTFEPFQDLFSSSRSGWRRATRSFR

SEQ ID NO: 26801 - protein, 80 aa, Synthetic construct
TPVPMEEDPLLDTDMLMSEFSDTLFSTLSSHQPVAWPNPREIPGLIPLQPNLDFMDTFEPFQDLFSSSRSGWRRATRSFR

SEQ ID NO: 26802 - protein, 80 aa, Synthetic construct
TPVPMEEDPLLDTDMLMSEFSDTLFSTLSSHQPVAWPNPREIAHLGPLQPNLDFMDTFEPFQDLFSSSRSGWRRATRSFR

SEQ ID NO: 26803 - protein, 80 aa, Synthetic construct
TPVPMEEDPLLDTDMLMSEFSDTLFSTLSSHQPVAWPNPREIAHLGNAQPNLDFMDTFEPFQDLFSSSRSGWRRATRSFR

SEQ ID NO: 26804 - protein, 80 aa, Synthetic construct
TPVPMEEDPLLDTDMLMSEFSDTLFSTLSSHQPVAWPNPREIAHLGNADMNLDFMDTFEPFQDLFSSSRSGWRRATRSFR

SEQ ID NO: 26805 - protein, 80 aa, Synthetic construct
TPVPMEEDPLLDTDMLMSEFSDTLFSTLSSHQPVAWPNPREIAHLGNADMIQDFMDTFEPFQDLFSSSRSGWRRATRSFR

SEQ ID NO: 26806 - protein, 80 aa, Synthetic construct
TPVPMEEDPLLDTDMLMSEFSDTLFSTLSSHQPVAWPNPREIAHLGNADMIQPGMDTFEPFQDLFSSSRSGWRRATRSFR

SEQ ID NO: 26807 - protein, 80 aa, Synthetic construct
TPVPMEEDPLLDTDMLMSEFSDTLFSTLSSHQPVAWPNPREIAHLGNADMIQPGLITFEPFQDLFSSSRSGWRRATRSFR

SEQ ID NO: 26808 - protein, 80 aa, Synthetic construct
TPVPMEEDPLLDTDMLMSEFSDTLFSTLSSHQPVAWPNPREIAHLGNADMIQPGLIPLEPFQDLFSSSRSGWRRATRSFR

SEQ ID NO: 26809 - protein, 80 aa, Synthetic construct
TPVPMEEDPLLDTDMLMSEFSDTLFSTLSSHQPVAWPNPREIAHLGNADMIQPGLIPLQPFQDLFSSSRSGWRRATRSFR

SEQ ID NO: 26810 - protein, 80 aa, Synthetic construct
TPVPMEEDPLLDTDMLMSEFSDTLFSTLSSHQPVAWPNPREIAHLGNADMIQPGLIPLQPNLDLFSSSRSGWRRATRSFR

SEQ ID NO: 26811 - protein, 80 aa, Synthetic construct
TPVPMEEDPLLDTDMLMSEFSDTLFSTLSSHQPVAWPNPREIAHLGNADMIQPGLIPLQPNLDFFSSSRSGWRRATRSFR

SEQ ID NO: 26812 - protein, 80 aa, Synthetic construct
TPVPMEEDPLLDTDMLMSEFSDTLFSTLSSHQPVAWPNPREIAHLGNADMIQPGLIPLQPNLDFMDSSRSGWRRATRSFR

SEQ ID NO: 26813 - protein, 80 aa, Synthetic construct
TPVPMEEDPLLDTDMLMSEFSDTLFSTLSSHQPVAWPNPREIAHLGNADMIQPGLIPLQPNLDFMDTFRSGWRRATRSFR

SEQ ID NO: 26814 - protein, 80 aa, Synthetic construct
SDTLFSTLSSHQPVAWPNPREIAHLGNADMIQPGLIPLQPNLDFMDTFEPFQDLFSSSRSIFGSMLPASAGWRRATRSFR

SEQ ID NO: 26815 - protein, 80 aa, Synthetic construct
LDTLFSTLSSHQPVAWPNPREIAHLGNADMIQPGLIPLQPNLDFMDTFEPFQDLFSSSRSIFGSMLPASAGWRRATRSFR

SEQ ID NO: 26816 - protein, 80 aa, Synthetic construct
LDTDFSTLSSHQPVAWPNPREIAHLGNADMIQPGLIPLQPNLDFMDTFEPFQDLFSSSRSIFGSMLPASAGWRRATRSFR

SEQ ID NO: 26817 - protein, 80 aa, Synthetic construct
LDTDMLTLSSHQPVAWPNPREIAHLGNADMIQPGLIPLQPNLDFMDTFEPFQDLFSSSRSIFGSMLPASAGWRRATRSFR

SEQ ID NO: 26818 - protein, 80 aa, Synthetic construct
LDTDMLMSSSHQPVAWPNPREIAHLGNADMIQPGLIPLQPNLDFMDTFEPFQDLFSSSRSIFGSMLPASAGWRRATRSFR

SEQ ID NO: 26819 - protein, 80 aa, Synthetic construct
LDTDMLMSEFHQPVAWPNPREIAHLGNADMIQPGLIPLQPNLDFMDTFEPFQDLFSSSRSIFGSMLPASAGWRRATRSFR

SEQ ID NO: 26820 - protein, 80 aa, Synthetic construct
LDTDMLMSEFSDPVAWPNPREIAHLGNADMIQPGLIPLQPNLDFMDTFEPFQDLFSSSRSIFGSMLPASAGWRRATRSFR

SEQ ID NO: 26821 - protein, 80 aa, Synthetic construct
LDTDMLMSEFSDTLAWPNPREIAHLGNADMIQPGLIPLQPNLDFMDTFEPFQDLFSSSRSIFGSMLPASAGWRRATRSFR

SEQ ID NO: 26822 - protein, 80 aa, Synthetic construct
LDTDMLMSEFSDTLFSPNPREIAHLGNADMIQPGLIPLQPNLDFMDTFEPFQDLFSSSRSIFGSMLPASAGWRRATRSFR

SEQ ID NO: 26823 - protein, 80 aa, Synthetic construct
LDTDMLMSEFSDTLFSTLPREIAHLGNADMIQPGLIPLQPNLDFMDTFEPFQDLFSSSRSIFGSMLPASAGWRRATRSFR

SEQ ID NO: 26824 - protein, 80 aa, Synthetic construct
LDTDMLMSEFSDTLFSTLSSEIAHLGNADMIQPGLIPLQPNLDFMDTFEPFQDLFSSSRSIFGSMLPASAGWRRATRSFR

SEQ ID NO: 26825 - protein, 80 aa, Synthetic construct
LDTDMLMSEFSDTLFSTLSSHQAHLGNADMIQPGLIPLQPNLDFMDTFEPFQDLFSSSRSIFGSMLPASAGWRRATRSFR

SEQ ID NO: 26826 - protein, 80 aa, Synthetic construct
LDTDMLMSEFSDTLFSTLSSHQPVLGNADMIQPGLIPLQPNLDFMDTFEPFQDLFSSSRSIFGSMLPASAGWRRATRSFR

SEQ ID NO: 26827 - protein, 80 aa, Synthetic construct
LDTDMLMSEFSDTLFSTLSSHQPVAWNADMIQPGLIPLQPNLDFMDTFEPFQDLFSSSRSIFGSMLPASAGWRRATRSFR

SEQ ID NO: 26828 - protein, 80 aa, Synthetic construct
LDTDMLMSEFSDTLFSTLSSHQPVAWPNPRIQPGLIPLQPNLDFMDTFEPFQDLFSSSRSIFGSMLPASAGWRRATRSFR

SEQ ID NO: 26829 - protein, 80 aa, Synthetic construct
LDTDMLMSEFSDTLFSTLSSHQPVAWPNPREIPGLIPLQPNLDFMDTFEPFQDLFSSSRSIFGSMLPASAGWRRATRSFR

SEQ ID NO: 26830 - protein, 80 aa, Synthetic construct
LDTDMLMSEFSDTLFSTLSSHQPVAWPNPREIAHLGPLQPNLDFMDTFEPFQDLFSSSRSIFGSMLPASAGWRRATRSFR

SEQ ID NO: 26831 - protein, 80 aa, Synthetic construct
LDTDMLMSEFSDTLFSTLSSHQPVAWPNPREIAHLGNAQPNLDFMDTFEPFQDLFSSSRSIFGSMLPASAGWRRATRSFR

SEQ ID NO: 26832 - protein, 80 aa, Synthetic construct
LDTDMLMSEFSDTLFSTLSSHQPVAWPNPREIAHLGNADMNLDFMDTFEPFQDLFSSSRSIFGSMLPASAGWRRATRSFR

SEQ ID NO: 26833 - protein, 80 aa, Synthetic construct
LDTDMLMSEFSDTLFSTLSSHQPVAWPNPREIAHLGNADMIQDFMDTFEPFQDLFSSSRSIFGSMLPASAGWRRATRSFR

SEQ ID NO: 26834 - protein, 80 aa, Synthetic construct
LDTDMLMSEFSDTLFSTLSSHQPVAWPNPREIAHLGNADMIQPGMDTFEPFQDLFSSSRSIFGSMLPASAGWRRATRSFR

SEQ ID NO: 26835 - protein, 80 aa, Synthetic construct
LDTDMLMSEFSDTLFSTLSSHQPVAWPNPREIAHLGNADMIQPGLITFEPFQDLFSSSRSIFGSMLPASAGWRRATRSFR

SEQ ID NO: 26836 - protein, 80 aa, Synthetic construct
LDTDMLMSEFSDTLFSTLSSHQPVAWPNPREIAHLGNADMIQPGLIPLEPFQDLFSSSRSIFGSMLPASAGWRRATRSFR

SEQ ID NO: 26837 - protein, 80 aa, Synthetic construct
LDTDMLMSEFSDTLFSTLSSHQPVAWPNPREIAHLGNADMIQPGLIPLQPFQDLFSSSRSIFGSMLPASAGWRRATRSFR

SEQ ID NO: 26838 - protein, 80 aa, Synthetic construct
LDTDMLMSEFSDTLFSTLSSHQPVAWPNPREIAHLGNADMIQPGLIPLQPNLDLFSSSRSIFGSMLPASAGWRRATRSFR

SEQ ID NO: 26839 - protein, 80 aa, Synthetic construct
LDTDMLMSEFSDTLFSTLSSHQPVAWPNPREIAHLGNADMIQPGLIPLQPNLDFFSSSRSIFGSMLPASAGWRRATRSFR

SEQ ID NO: 26840 - protein, 80 aa, Synthetic construct
LDTDMLMSEFSDTLFSTLSSHQPVAWPNPREIAHLGNADMIQPGLIPLQPNLDFMDSSRSIFGSMLPASAGWRRATRSFR

SEQ ID NO: 26841 - protein, 80 aa, Synthetic construct
LDTDMLMSEFSDTLFSTLSSHQPVAWPNPREIAHLGNADMIQPGLIPLQPNLDFMDTFEPIFGSMLPASAGWRRATRSFR

SEQ ID NO: 26842 - protein, 80 aa, Synthetic construct
LDTDMLMSEFSDTLFSTLSSHQPVAWPNPREIAHLGNADMIQPGLIPLQPNLDFMDTFEPFQGSMLPASAGWRRATRSFR

SEQ ID NO: 26843 - protein, 80 aa, Synthetic construct
LDTDMLMSEFSDTLFSTLSSHQPVAWPNPREIAHLGNADMIQPGLIPLQPNLDFMDTFEPFQDLMLPASAGWRRATRSFR

SEQ ID NO: 26844 - protein, 80 aa, Synthetic construct
LDTDMLMSEFSDTLFSTLSSHQPVAWPNPREIAHLGNADMIQPGLIPLQPNLDFMDTFEPFQDLFSPASAGWRRATRSFR

SEQ ID NO: 26845 - protein, 80 aa, Synthetic construct
LDTDMLMSEFSDTLFSTLSSHQPVAWPNPREIAHLGNADMIQPGLIPLQPNLDFMDTFEPFQDLFSSSSAGWRRATRSFR

SEQ ID NO: 26846 - protein, 80 aa, Synthetic construct
ISDFYSSLPSQPLDPSNWAWNSTFTESSTSDFQMQDTQWERLVASVPALYSDAYDIFQIIELYNLPDENEGWRRATRSFR

SEQ ID NO: 26847 - protein, 80 aa, Synthetic construct
SPDFYSSLPSQPLDPSNWAWNSTFTESSTSDFQMQDTQWERLVASVPALYSDAYDIFQIIELYNLPDENEGWRRATRSFR

SEQ ID NO: 26848 - protein, 80 aa, Synthetic construct
SPSPYSSLPSQPLDPSNWAWNSTFTESSTSDFQMQDTQWERLVASVPALYSDAYDIFQIIELYNLPDENEGWRRATRSFR

SEQ ID NO: 26849 - protein, 80 aa, Synthetic construct
SPSPYASLPSQPLDPSNWAWNSTFTESSTSDFQMQDTQWERLVASVPALYSDAYDIFQIIELYNLPDENEGWRRATRSFR

SEQ ID NO: 26850 - protein, 80 aa, Synthetic construct
SPSPYAFSPSQPLDPSNWAWNSTFTESSTSDFQMQDTQWERLVASVPALYSDAYDIFQIIELYNLPDENEGWRRATRSFR

SEQ ID NO: 26851 - protein, 80 aa, Synthetic construct
SPSPYAFSPVQPLDPSNWAWNSTFTESSTSDFQMQDTQWERLVASVPALYSDAYDIFQIIELYNLPDENEGWRRATRSFR

SEQ ID NO: 26852 - protein, 80 aa, Synthetic construct
SPSPYAFSPVISLDPSNWAWNSTFTESSTSDFQMQDTQWERLVASVPALYSDAYDIFQIIELYNLPDENEGWRRATRSFR

SEQ ID NO: 26853 - protein, 80 aa, Synthetic construct
SPSPYAFSPVISDFPSNWAWNSTFTESSTSDFQMQDTQWERLVASVPALYSDAYDIFQIIELYNLPDENEGWRRATRSFR

SEQ ID NO: 26854 - protein, 80 aa, Synthetic construct
SPSPYAFSPVISDFYSNWAWNSTFTESSTSDFQMQDTQWERLVASVPALYSDAYDIFQIIELYNLPDENEGWRRATRSFR

SEQ ID NO: 26855 - protein, 80 aa, Synthetic construct
SPSPYAFSPVISDFYSSLAWNSTFTESSTSDFQMQDTQWERLVASVPALYSDAYDIFQIIELYNLPDENEGWRRATRSFR

SEQ ID NO: 26856 - protein, 80 aa, Synthetic construct
SPSPYAFSPVISDFYSSLPSNSTFTESSTSDFQMQDTQWERLVASVPALYSDAYDIFQIIELYNLPDENEGWRRATRSFR

SEQ ID NO: 26857 - protein, 80 aa, Synthetic construct
SPSPYAFSPVISDFYSSLPSQPTFTESSTSDFQMQDTQWERLVASVPALYSDAYDIFQIIELYNLPDENEGWRRATRSFR

SEQ ID NO: 26858 - protein, 80 aa, Synthetic construct
SPSPYAFSPVISDFYSSLPSQPLDTESSTSDFQMQDTQWERLVASVPALYSDAYDIFQIIELYNLPDENEGWRRATRSFR

SEQ ID NO: 26859 - protein, 80 aa, Synthetic construct
SPSPYAFSPVISDFYSSLPSQPLDPSSSTSDFQMQDTQWERLVASVPALYSDAYDIFQIIELYNLPDENEGWRRATRSFR

SEQ ID NO: 26860 - protein, 80 aa, Synthetic construct
SPSPYAFSPVISDFYSSLPSQPLDPSNWTSDFQMQDTQWERLVASVPALYSDAYDIFQIIELYNLPDENEGWRRATRSFR

SEQ ID NO: 26861 - protein, 80 aa, Synthetic construct
SPSPYAFSPVISDFYSSLPSQPLDPSNWAWDFQMQDTQWERLVASVPALYSDAYDIFQIIELYNLPDENEGWRRATRSFR

SEQ ID NO: 26862 - protein, 80 aa, Synthetic construct
SPSPYAFSPVISDFYSSLPSQPLDPSNWAWNSQMQDTQWERLVASVPALYSDAYDIFQIIELYNLPDENEGWRRATRSFR

SEQ ID NO: 26863 - protein, 80 aa, Synthetic construct
SPSPYAFSPVISDFYSSLPSQPLDPSNWAWNSTFQDTQWERLVASVPALYSDAYDIFQIIELYNLPDENEGWRRATRSFR

SEQ ID NO: 26864 - protein, 80 aa, Synthetic construct
SPSPYAFSPVISDFYSSLPSQPLDPSNWAWNSTFTETQWERLVASVPALYSDAYDIFQIIELYNLPDENEGWRRATRSFR

SEQ ID NO: 26865 - protein, 80 aa, Synthetic construct
SPSPYAFSPVISDFYSSLPSQPLDPSNWAWNSTFTESSWERLVASVPALYSDAYDIFQIIELYNLPDENEGWRRATRSFR

SEQ ID NO: 26866 - protein, 80 aa, Synthetic construct
SPSPYAFSPVISDFYSSLPSQPLDPSNWAWNSTFTESSTSRLVASVPALYSDAYDIFQIIELYNLPDENEGWRRATRSFR

SEQ ID NO: 26867 - protein, 80 aa, Synthetic construct
SPSPYAFSPVISDFYSSLPSQPLDPSNWAWNSTFTESSTSDFVASVPALYSDAYDIFQIIELYNLPDENEGWRRATRSFR

SEQ ID NO: 26868 - protein, 80 aa, Synthetic construct
SPSPYAFSPVISDFYSSLPSQPLDPSNWAWNSTFTESSTSDFQMQDTQWERLVASVPALYELYNLPDENEGWRRATRSFR

SEQ ID NO: 26869 - protein, 80 aa, Synthetic construct
SPSPYAFSPVISDFYSSLPSQPLDPSNWAWNSTFTESSTSDFQMQDTQWERLVASVPALYSDYNLPDENEGWRRATRSFR

SEQ ID NO: 26870 - protein, 80 aa, Synthetic construct
SPSPYAFSPVISDFYSSLPSQPLDPSNWAWNSTFTESSTSDFQMQDTQWERLVASVPALYSDAYLPDENEGWRRATRSFR

SEQ ID NO: 26871 - protein, 80 aa, Synthetic construct
SPSPYAFSPVISDFYSSLPSQPLDPSNWAWNSTFTESSTSDFQMQDTQWERLVASVPALYSDAYDIDENEGWRRATRSFR

SEQ ID NO: 26872 - protein, 80 aa, Synthetic construct
QPLDPSNWAWNSTFTESSTSDFQMQDTQWERLVASVPALYSDAYDIFQIIELYNLPDENEISSSSFHCLYGWRRATRSFR

SEQ ID NO: 26873 - protein, 80 aa, Synthetic construct
ISLDPSNWAWNSTFTESSTSDFQMQDTQWERLVASVPALYSDAYDIFQIIELYNLPDENEISSSSFHCLYGWRRATRSFR

SEQ ID NO: 26874 - protein, 80 aa, Synthetic construct
ISDFPSNWAWNSTFTESSTSDFQMQDTQWERLVASVPALYSDAYDIFQIIELYNLPDENEISSSSFHCLYGWRRATRSFR

SEQ ID NO: 26875 - protein, 80 aa, Synthetic construct
ISDFYSNWAWNSTFTESSTSDFQMQDTQWERLVASVPALYSDAYDIFQIIELYNLPDENEISSSSFHCLYGWRRATRSFR

SEQ ID NO: 26876 - protein, 80 aa, Synthetic construct
ISDFYSSLAWNSTFTESSTSDFQMQDTQWERLVASVPALYSDAYDIFQIIELYNLPDENEISSSSFHCLYGWRRATRSFR

SEQ ID NO: 26877 - protein, 80 aa, Synthetic construct
ISDFYSSLPSNSTFTESSTSDFQMQDTQWERLVASVPALYSDAYDIFQIIELYNLPDENEISSSSFHCLYGWRRATRSFR

SEQ ID NO: 26878 - protein, 80 aa, Synthetic construct
ISDFYSSLPSQPTFTESSTSDFQMQDTQWERLVASVPALYSDAYDIFQIIELYNLPDENEISSSSFHCLYGWRRATRSFR

SEQ ID NO: 26879 - protein, 80 aa, Synthetic construct
ISDFYSSLPSQPLDTESSTSDFQMQDTQWERLVASVPALYSDAYDIFQIIELYNLPDENEISSSSFHCLYGWRRATRSFR

SEQ ID NO: 26880 - protein, 80 aa, Synthetic construct
ISDFYSSLPSQPLDPSSSTSDFQMQDTQWERLVASVPALYSDAYDIFQIIELYNLPDENEISSSSFHCLYGWRRATRSFR

SEQ ID NO: 26881 - protein, 80 aa, Synthetic construct
ISDFYSSLPSQPLDPSNWTSDFQMQDTQWERLVASVPALYSDAYDIFQIIELYNLPDENEISSSSFHCLYGWRRATRSFR

SEQ ID NO: 26882 - protein, 80 aa, Synthetic construct
ISDFYSSLPSQPLDPSNWAWDFQMQDTQWERLVASVPALYSDAYDIFQIIELYNLPDENEISSSSFHCLYGWRRATRSFR

SEQ ID NO: 26883 - protein, 80 aa, Synthetic construct
ISDFYSSLPSQPLDPSNWAWNSQMQDTQWERLVASVPALYSDAYDIFQIIELYNLPDENEISSSSFHCLYGWRRATRSFR

SEQ ID NO: 26884 - protein, 80 aa, Synthetic construct
ISDFYSSLPSQPLDPSNWAWNSTFQDTQWERLVASVPALYSDAYDIFQIIELYNLPDENEISSSSFHCLYGWRRATRSFR

SEQ ID NO: 26885 - protein, 80 aa, Synthetic construct
ISDFYSSLPSQPLDPSNWAWNSTFTETQWERLVASVPALYSDAYDIFQIIELYNLPDENEISSSSFHCLYGWRRATRSFR

SEQ ID NO: 26886 - protein, 80 aa, Synthetic construct
ISDFYSSLPSQPLDPSNWAWNSTFTESSWERLVASVPALYSDAYDIFQIIELYNLPDENEISSSSFHCLYGWRRATRSFR

SEQ ID NO: 26887 - protein, 80 aa, Synthetic construct
ISDFYSSLPSQPLDPSNWAWNSTFTESSTSRLVASVPALYSDAYDIFQIIELYNLPDENEISSSSFHCLYGWRRATRSFR

SEQ ID NO: 26888 - protein, 80 aa, Synthetic construct
ISDFYSSLPSQPLDPSNWAWNSTFTESSTSDFVASVPALYSDAYDIFQIIELYNLPDENEISSSSFHCLYGWRRATRSFR

SEQ ID NO: 26889 - protein, 80 aa, Synthetic construct
ISDFYSSLPSQPLDPSNWAWNSTFTESSTSDFQMQDTQWERLVASVPALYSDAYDIFQIIELYNLPHCLYGWRRATRSFR

SEQ ID NO: 26890 - protein, 80 aa, Synthetic construct
ISDFYSSLPSQPLDPSNWAWNSTFTESSTSDFQMQDTQWERLVASVPALYSDAYDIFQIIELYNLPDELYGWRRATRSFR

SEQ ID NO: 26891 - protein, 80 aa, Synthetic construct
NSTFTESSTSRLVASVPALYSDAYDIFQIIELYNLPDENEISSSSFHCLYQYLSPTKYQVGGQGSSLSIFGWRRATRSFR

SEQ ID NO: 26892 - protein, 80 aa, Synthetic construct
NSTFTESSTSDFVASVPALYSDAYDIFQIIELYNLPDENEISSSSFHCLYQYLSPTKYQVGGQGSSLSIFGWRRATRSFR

SEQ ID NO: 26893 - protein, 80 aa, Synthetic construct
NSTFTESSTSDFQMSVPALYSDAYDIFQIIELYNLPDENEISSSSFHCLYQYLSPTKYQVGGQGSSLSIFGWRRATRSFR

SEQ ID NO: 26894 - protein, 80 aa, Synthetic construct
NSTFTESSTSDFQMQDPALYSDAYDIFQIIELYNLPDENEISSSSFHCLYQYLSPTKYQVGGQGSSLSIFGWRRATRSFR

SEQ ID NO: 26895 - protein, 80 aa, Synthetic construct
NSTFTESSTSDFQMQDTQLYSDAYDIFQIIELYNLPDENEISSSSFHCLYQYLSPTKYQVGGQGSSLSIFGWRRATRSFR

SEQ ID NO: 26896 - protein, 80 aa, Synthetic construct
NSTFTESSTSDFQMQDTQWESDAYDIFQIIELYNLPDENEISSSSFHCLYQYLSPTKYQVGGQGSSLSIFGWRRATRSFR

SEQ ID NO: 26897 - protein, 80 aa, Synthetic construct
NSTFTESSTSDFQMQDTQWERLVASVPALYELYNLPDENEISSSSFHCLYQYLSPTKYQVGGQGSSLSIFGWRRATRSFR

SEQ ID NO: 26898 - protein, 80 aa, Synthetic construct
NSTFTESSTSDFQMQDTQWERLVASVPALYSDYNLPDENEISSSSFHCLYQYLSPTKYQVGGQGSSLSIFGWRRATRSFR

SEQ ID NO: 26899 - protein, 80 aa, Synthetic construct
NSTFTESSTSDFQMQDTQWERLVASVPALYSDAYLPDENEISSSSFHCLYQYLSPTKYQVGGQGSSLSIFGWRRATRSFR

SEQ ID NO: 26900 - protein, 80 aa, Synthetic construct
NSTFTESSTSDFQMQDTQWERLVASVPALYSDAYDIDENEISSSSFHCLYQYLSPTKYQVGGQGSSLSIFGWRRATRSFR

SEQ ID NO: 26901 - protein, 80 aa, Synthetic construct
NSTFTESSTSDFQMQDTQWERLVASVPALYSDAYDIFQNEISSSSFHCLYQYLSPTKYQVGGQGSSLSIFGWRRATRSFR

SEQ ID NO: 26902 - protein, 80 aa, Synthetic construct
NSTFTESSTSDFQMQDTQWERLVASVPALYSDAYDIFQIIELYNLPDELYQYLSPTKYQVGGQGSSLSIFGWRRATRSFR

SEQ ID NO: 26903 - protein, 80 aa, Synthetic construct
NSTFTESSTSDFQMQDTQWERLVASVPALYSDAYDIFQIIELYNLPDENEQYLSPTKYQVGGQGSSLSIFGWRRATRSFR

SEQ ID NO: 26904 - protein, 80 aa, Synthetic construct
NSTFTESSTSDFQMQDTQWERLVASVPALYSDAYDIFQIIELYNLPDENEISLSPTKYQVGGQGSSLSIFGWRRATRSFR

SEQ ID NO: 26905 - protein, 80 aa, Synthetic construct
NSTFTESSTSDFQMQDTQWERLVASVPALYSDAYDIFQIIELYNLPDENEISSSPTKYQVGGQGSSLSIFGWRRATRSFR

SEQ ID NO: 26906 - protein, 80 aa, Synthetic construct
NSTFTESSTSDFQMQDTQWERLVASVPALYSDAYDIFQIIELYNLPDENEISSSSFKYQVGGQGSSLSIFGWRRATRSFR

SEQ ID NO: 26907 - protein, 80 aa, Synthetic construct
NSTFTESSTSDFQMQDTQWERLVASVPALYSDAYDIFQIIELYNLPDENEISSSSFHCQVGGQGSSLSIFGWRRATRSFR

SEQ ID NO: 26908 - protein, 80 aa, Synthetic construct
NSTFTESSTSDFQMQDTQWERLVASVPALYSDAYDIFQIIELYNLPDENEISSSSFHCLYGGQGSSLSIFGWRRATRSFR

SEQ ID NO: 26909 - protein, 80 aa, Synthetic construct
NSTFTESSTSDFQMQDTQWERLVASVPALYSDAYDIFQIIELYNLPDENEISSSSFHCLYQYQGSSLSIFGWRRATRSFR

SEQ ID NO: 26910 - protein, 80 aa, Synthetic construct
RLVASVPALYSDAYDIFQIIELYNLPDENEISSSSFHCLYQYLSPTKYQVGGQGSSLSIFAGPAVGLSPAGWRRATRSFR

SEQ ID NO: 26911 - protein, 80 aa, Synthetic construct
DFVASVPALYSDAYDIFQIIELYNLPDENEISSSSFHCLYQYLSPTKYQVGGQGSSLSIFAGPAVGLSPAGWRRATRSFR

SEQ ID NO: 26912 - protein, 80 aa, Synthetic construct
DFQMQDTQWERLVASVPALYELYNLPDENEISSSSFHCLYQYLSPTKYQVGGQGSSLSIFAGPAVGLSPAGWRRATRSFR

SEQ ID NO: 26913 - protein, 80 aa, Synthetic construct
DFQMQDTQWERLVASVPALYSDYNLPDENEISSSSFHCLYQYLSPTKYQVGGQGSSLSIFAGPAVGLSPAGWRRATRSFR

SEQ ID NO: 26914 - protein, 80 aa, Synthetic construct
DFQMQDTQWERLVASVPALYSDAYLPDENEISSSSFHCLYQYLSPTKYQVGGQGSSLSIFAGPAVGLSPAGWRRATRSFR

SEQ ID NO: 26915 - protein, 80 aa, Synthetic construct
DFQMQDTQWERLVASVPALYSDAYDIDENEISSSSFHCLYQYLSPTKYQVGGQGSSLSIFAGPAVGLSPAGWRRATRSFR

SEQ ID NO: 26916 - protein, 80 aa, Synthetic construct
DFQMQDTQWERLVASVPALYSDAYDIFQNEISSSSFHCLYQYLSPTKYQVGGQGSSLSIFAGPAVGLSPAGWRRATRSFR

SEQ ID NO: 26917 - protein, 80 aa, Synthetic construct
DFQMQDTQWERLVASVPALYSDAYDIFQIIELYNLPDELYQYLSPTKYQVGGQGSSLSIFAGPAVGLSPAGWRRATRSFR

SEQ ID NO: 26918 - protein, 80 aa, Synthetic construct
DFQMQDTQWERLVASVPALYSDAYDIFQIIELYNLPDENEQYLSPTKYQVGGQGSSLSIFAGPAVGLSPAGWRRATRSFR

SEQ ID NO: 26919 - protein, 80 aa, Synthetic construct
DFQMQDTQWERLVASVPALYSDAYDIFQIIELYNLPDENEISLSPTKYQVGGQGSSLSIFAGPAVGLSPAGWRRATRSFR

SEQ ID NO: 26920 - protein, 80 aa, Synthetic construct
DFQMQDTQWERLVASVPALYSDAYDIFQIIELYNLPDENEISSSPTKYQVGGQGSSLSIFAGPAVGLSPAGWRRATRSFR

SEQ ID NO: 26921 - protein, 80 aa, Synthetic construct
DFQMQDTQWERLVASVPALYSDAYDIFQIIELYNLPDENEISSSSFKYQVGGQGSSLSIFAGPAVGLSPAGWRRATRSFR

SEQ ID NO: 26922 - protein, 80 aa, Synthetic construct
DFQMQDTQWERLVASVPALYSDAYDIFQIIELYNLPDENEISSSSFHCQVGGQGSSLSIFAGPAVGLSPAGWRRATRSFR

SEQ ID NO: 26923 - protein, 80 aa, Synthetic construct
DFQMQDTQWERLVASVPALYSDAYDIFQIIELYNLPDENEISSSSFHCLYGGQGSSLSIFAGPAVGLSPAGWRRATRSFR

SEQ ID NO: 26924 - protein, 80 aa, Synthetic construct
DFQMQDTQWERLVASVPALYSDAYDIFQIIELYNLPDENEISSSSFHCLYQYQGSSLSIFAGPAVGLSPAGWRRATRSFR

SEQ ID NO: 26925 - protein, 80 aa, Synthetic construct
DFQMQDTQWERLVASVPALYSDAYDIFQIIELYNLPDENEISSSSFHCLYQYLSSSLSIFAGPAVGLSPAGWRRATRSFR

SEQ ID NO: 26926 - protein, 80 aa, Synthetic construct
RLVASVPALYELYNLPDENEISSSSFHCLYQYLSPTKYQVGGQGSSLSIFAGPAVGLSPAQTWPNMTSQAGWRRATRSFR

SEQ ID NO: 26927 - protein, 80 aa, Synthetic construct
RLVASVPALYSDAYLPDENEISSSSFHCLYQYLSPTKYQVGGQGSSLSIFAGPAVGLSPAQTWPNMTSQAGWRRATRSFR

SEQ ID NO: 26928 - protein, 80 aa, Synthetic construct
RLVASVPALYSDAYDIDENEISSSSFHCLYQYLSPTKYQVGGQGSSLSIFAGPAVGLSPAQTWPNMTSQAGWRRATRSFR

SEQ ID NO: 26929 - protein, 80 aa, Synthetic construct
RLVASVPALYSDAYDIFQIIELYNLPDENEQYLSPTKYQVGGQGSSLSIFAGPAVGLSPAQTWPNMTSQAGWRRATRSFR

SEQ ID NO: 26930 - protein, 80 aa, Synthetic construct
RLVASVPALYSDAYDIFQIIELYNLPDENEISLSPTKYQVGGQGSSLSIFAGPAVGLSPAQTWPNMTSQAGWRRATRSFR

SEQ ID NO: 26931 - protein, 80 aa, Synthetic construct
RLVASVPALYSDAYDIFQIIELYNLPDENEISSSPTKYQVGGQGSSLSIFAGPAVGLSPAQTWPNMTSQAGWRRATRSFR

SEQ ID NO: 26932 - protein, 80 aa, Synthetic construct
RLVASVPALYSDAYDIFQIIELYNLPDENEISSSSFKYQVGGQGSSLSIFAGPAVGLSPAQTWPNMTSQAGWRRATRSFR

SEQ ID NO: 26933 - protein, 80 aa, Synthetic construct
RLVASVPALYSDAYDIFQIIELYNLPDENEISSSSFHCQVGGQGSSLSIFAGPAVGLSPAQTWPNMTSQAGWRRATRSFR

SEQ ID NO: 26934 - protein, 80 aa, Synthetic construct
RLVASVPALYSDAYDIFQIIELYNLPDENEISSSSFHCLYQYLSSSLSIFAGPAVGLSPAQTWPNMTSQAGWRRATRSFR

SEQ ID NO: 26935 - protein, 80 aa, Synthetic construct
RLVASVPALYSDAYDIFQIIELYNLPDENEISSSSFHCLYQYLSPTLSIFAGPAVGLSPAQTWPNMTSQAGWRRATRSFR

SEQ ID NO: 26936 - protein, 80 aa, Synthetic construct
RLVASVPALYSDAYDIFQIIELYNLPDENEISSSSFHCLYQYLSPTKYIFAGPAVGLSPAQTWPNMTSQAGWRRATRSFR

SEQ ID NO: 26937 - protein, 80 aa, Synthetic construct
RLVASVPALYSDAYDIFQIIELYNLPDENEISSSSFHCLYQYLSPTKYQVAGPAVGLSPAQTWPNMTSQAGWRRATRSFR

SEQ ID NO: 26938 - protein, 80 aa, Synthetic construct
RLVASVPALYSDAYDIFQIIELYNLPDENEISSSSFHCLYQYLSPTKYQVGGPAVGLSPAQTWPNMTSQAGWRRATRSFR

SEQ ID NO: 26939 - protein, 80 aa, Synthetic construct
RLVASVPALYSDAYDIFQIIELYNLPDENEISSSSFHCLYQYLSPTKYQVGGQGVGLSPAQTWPNMTSQAGWRRATRSFR

SEQ ID NO: 26940 - protein, 80 aa, Synthetic construct
RLVASVPALYSDAYDIFQIIELYNLPDENEISSSSFHCLYQYLSPTKYQVGGQGSSLSPAQTWPNMTSQAGWRRATRSFR

SEQ ID NO: 26941 - protein, 80 aa, Synthetic construct
RLVASVPALYSDAYDIFQIIELYNLPDENEISSSSFHCLYQYLSPTKYQVGGQGSSLSIFQTWPNMTSQAGWRRATRSFR

SEQ ID NO: 26942 - protein, 80 aa, Synthetic construct
RLVASVPALYSDAYDIFQIIELYNLPDENEISSSSFHCLYQYLSPTKYQVGGQGSSLSIFAGWPNMTSQAGWRRATRSFR

SEQ ID NO: 26943 - protein, 80 aa, Synthetic construct
RLVASVPALYSDAYDIFQIIELYNLPDENEISSSSFHCLYQYLSPTKYQVGGQGSSLSIFAGPANMTSQAGWRRATRSFR

SEQ ID NO: 26944 - protein, 80 aa, Synthetic construct
RLVASVPALYSDAYDIFQIIELYNLPDENEISSSSFHCLYQYLSPTKYQVGGQGSSLSIFAGPAVGTSQAGWRRATRSFR

SEQ ID NO: 26945 - protein, 80 aa, Synthetic construct
RLVASVPALYSDAYDIFQIIELYNLPDENEISSSSFHCLYQYLSPTKYQVGGQGSSLSIFAGPAVGLSQAGWRRATRSFR

SEQ ID NO: 26946 - protein, 80 aa, Synthetic construct
TMETLTELGDELTLGDIDEMLQFVSNQVGEFPDLFSEQLCSSFPGSGGSGSSSGSSGSSSSSSNGRGSSSGWRRATRSFR

SEQ ID NO: 26947 - protein, 80 aa, Synthetic construct
DDETLTELGDELTLGDIDEMLQFVSNQVGEFPDLFSEQLCSSFPGSGGSGSSSGSSGSSSSSSNGRGSSSGWRRATRSFR

SEQ ID NO: 26948 - protein, 80 aa, Synthetic construct
DDSGLTELGDELTLGDIDEMLQFVSNQVGEFPDLFSEQLCSSFPGSGGSGSSSGSSGSSSSSSNGRGSSSGWRRATRSFR

SEQ ID NO: 26949 - protein, 80 aa, Synthetic construct
DDSGELELGDELTLGDIDEMLQFVSNQVGEFPDLFSEQLCSSFPGSGGSGSSSGSSGSSSSSSNGRGSSSGWRRATRSFR

SEQ ID NO: 26950 - protein, 80 aa, Synthetic construct
DDSGELGGLETMETLTELGDELTLGDIDEMFPDLFSEQLCSSFPGSGGSGSSSGSSGSSSSSSNGRGSSSGWRRATRSFR

SEQ ID NO: 26951 - protein, 80 aa, Synthetic construct
DDSGELGGLETMETLTELGDELTLGDIDEMLQDLFSEQLCSSFPGSGGSGSSSGSSGSSSSSSNGRGSSSGWRRATRSFR

SEQ ID NO: 26952 - protein, 80 aa, Synthetic construct
DDSGELGGLETMETLTELGDELTLGDIDEMLQFVFSEQLCSSFPGSGGSGSSSGSSGSSSSSSNGRGSSSGWRRATRSFR

SEQ ID NO: 26953 - protein, 80 aa, Synthetic construct
DDSGELGGLETMETLTELGDELTLGDIDEMLQFVSNQVLCSSFPGSGGSGSSSGSSGSSSSSSNGRGSSSGWRRATRSFR

SEQ ID NO: 26954 - protein, 80 aa, Synthetic construct
DDSGELGGLETMETLTELGDELTLGDIDEMLQFVSNQVGEFPFPGSGGSGSSSGSSGSSSSSSNGRGSSSGWRRATRSFR

SEQ ID NO: 26955 - protein, 80 aa, Synthetic construct
DDSGELGGLETMETLTELGDELTLGDIDEMLQFVSNQVGEFPDLGSGGSGSSSGSSGSSSSSSNGRGSSSGWRRATRSFR

SEQ ID NO: 26956 - protein, 80 aa, Synthetic construct
DDSGELGGLETMETLTELGDELTLGDIDEMLQFVSNQVGEFPDLFSGGSGSSSGSSGSSSSSSNGRGSSSGWRRATRSFR

SEQ ID NO: 26957 - protein, 80 aa, Synthetic construct
DDSGELGGLETMETLTELGDELTLGDIDEMLQFVSNQVGEFPDLFSEQSGSSSGSSGSSSSSSNGRGSSSGWRRATRSFR

SEQ ID NO: 26958 - protein, 80 aa, Synthetic construct
DDSGELGGLETMETLTELGDELTLGDIDEMLQFVSNQVGEFPDLFSEQLCSSSGSSGSSSSSSNGRGSSSGWRRATRSFR

SEQ ID NO: 26959 - protein, 80 aa, Synthetic construct
DDSGELGGLETMETLTELGDELTLGDIDEMLQFVSNQVGEFPDLFSEQLCSSFPSSGSSSSSSNGRGSSSGWRRATRSFR

SEQ ID NO: 26960 - protein, 80 aa, Synthetic construct
DDSGELGGLETMETLTELGDELTLGDIDEMLQFVSNQVGEFPDLFSEQLCSSFPGSGSSSSSSNGRGSSSGWRRATRSFR

SEQ ID NO: 26961 - protein, 80 aa, Synthetic construct
DDSGELGGLETMETLTELGDELTLGDIDEMLQFVSNQVGEFPDLFSEQLCSSFPGSGGSSSSSNGRGSSSGWRRATRSFR

SEQ ID NO: 26962 - protein, 80 aa, Synthetic construct
DDSGELGGLETMETLTELGDELTLGDIDEMLQFVSNQVGEFPDLFSEQLCSSFPGSGGSGSSSNGRGSSSGWRRATRSFR

SEQ ID NO: 26963 - protein, 80 aa, Synthetic construct
DDSGELGGLETMETLTELGDELTLGDIDEMLQFVSNQVGEFPDLFSEQLCSSFPGSGGSGSSSGGRGSSSGWRRATRSFR

SEQ ID NO: 26964 - protein, 80 aa, Synthetic construct
DDSGELGGLETMETLTELGDELTLGDIDEMLQFVSNQVGEFPDLFSEQLCSSFPGSGGSGSSSGSSGSSSGWRRATRSFR

SEQ ID NO: 26965 - protein, 80 aa, Synthetic construct
HYMGYPHMPSMDPHWPSLGVWGSPYSPPREDWSVYPGPSSTMGTVPVNDVTSSPAAFCSTDYSNLGPVGGGWRRATRSFR

SEQ ID NO: 26966 - protein, 80 aa, Synthetic construct
SNMGYPHMPSMDPHWPSLGVWGSPYSPPREDWSVYPGPSSTMGTVPVNDVTSSPAAFCSTDYSNLGPVGGGWRRATRSFR

SEQ ID NO: 26967 - protein, 80 aa, Synthetic construct
SNFAYPHMPSMDPHWPSLGVWGSPYSPPREDWSVYPGPSSTMGTVPVNDVTSSPAAFCSTDYSNLGPVGGGWRRATRSFR

SEQ ID NO: 26968 - protein, 80 aa, Synthetic construct
SNFAAAHMPSMDPHWPSLGVWGSPYSPPREDWSVYPGPSSTMGTVPVNDVTSSPAAFCSTDYSNLGPVGGGWRRATRSFR

SEQ ID NO: 26969 - protein, 80 aa, Synthetic construct
SNFAAAPAFSMDPHWPSLGVWGSPYSPPREDWSVYPGPSSTMGTVPVNDVTSSPAAFCSTDYSNLGPVGGGWRRATRSFR

SEQ ID NO: 26970 - protein, 80 aa, Synthetic construct
SNFAAAPAFSHYPHWPSLGVWGSPYSPPREDWSVYPGPSSTMGTVPVNDVTSSPAAFCSTDYSNLGPVGGGWRRATRSFR

SEQ ID NO: 26971 - protein, 80 aa, Synthetic construct
SNFAAAPAFSHYMGWPSLGVWGSPYSPPREDWSVYPGPSSTMGTVPVNDVTSSPAAFCSTDYSNLGPVGGGWRRATRSFR

SEQ ID NO: 26972 - protein, 80 aa, Synthetic construct
SNFAAAPAFSHYMGYPSLGVWGSPYSPPREDWSVYPGPSSTMGTVPVNDVTSSPAAFCSTDYSNLGPVGGGWRRATRSFR

SEQ ID NO: 26973 - protein, 80 aa, Synthetic construct
SNFAAAPAFSHYMGYPHMGVWGSPYSPPREDWSVYPGPSSTMGTVPVNDVTSSPAAFCSTDYSNLGPVGGGWRRATRSFR

SEQ ID NO: 26974 - protein, 80 aa, Synthetic construct
SNFAAAPAFSHYMGYPHMPSWGSPYSPPREDWSVYPGPSSTMGTVPVNDVTSSPAAFCSTDYSNLGPVGGGWRRATRSFR

SEQ ID NO: 26975 - protein, 80 aa, Synthetic construct
SNFAAAPAFSHYMGYPHMPSMDPHWPSLREDWSVYPGPSSTMGTVPVNDVTSSPAAFCSTDYSNLGPVGGGWRRATRSFR

SEQ ID NO: 26976 - protein, 80 aa, Synthetic construct
SNFAAAPAFSHYMGYPHMPSMDPHWPSLGVDWSVYPGPSSTMGTVPVNDVTSSPAAFCSTDYSNLGPVGGGWRRATRSFR

SEQ ID NO: 26977 - protein, 80 aa, Synthetic construct
SNFAAAPAFSHYMGYPHMPSMDPHWPSLGVWGSVYPGPSSTMGTVPVNDVTSSPAAFCSTDYSNLGPVGGGWRRATRSFR

SEQ ID NO: 26978 - protein, 80 aa, Synthetic construct
SNFAAAPAFSHYMGYPHMPSMDPHWPSLGVWGSPYPGPSSTMGTVPVNDVTSSPAAFCSTDYSNLGPVGGGWRRATRSFR

SEQ ID NO: 26979 - protein, 80 aa, Synthetic construct
SNFAAAPAFSHYMGYPHMPSMDPHWPSLGVWGSPYSGPSSTMGTVPVNDVTSSPAAFCSTDYSNLGPVGGGWRRATRSFR

SEQ ID NO: 26980 - protein, 80 aa, Synthetic construct
SNFAAAPAFSHYMGYPHMPSMDPHWPSLGVWGSPYSPPSSTMGTVPVNDVTSSPAAFCSTDYSNLGPVGGGWRRATRSFR

SEQ ID NO: 26981 - protein, 80 aa, Synthetic construct
SNFAAAPAFSHYMGYPHMPSMDPHWPSLGVWGSPYSPPRETMGTVPVNDVTSSPAAFCSTDYSNLGPVGGGWRRATRSFR

SEQ ID NO: 26982 - protein, 80 aa, Synthetic construct
SNFAAAPAFSHYMGYPHMPSMDPHWPSLGVWGSPYSPPREDWGTVPVNDVTSSPAAFCSTDYSNLGPVGGGWRRATRSFR

SEQ ID NO: 26983 - protein, 80 aa, Synthetic construct
SNFAAAPAFSHYMGYPHMPSMDPHWPSLGVWGSPYSPPREDWSVVPVNDVTSSPAAFCSTDYSNLGPVGGGWRRATRSFR

SEQ ID NO: 26984 - protein, 80 aa, Synthetic construct
SNFAAAPAFSHYMGYPHMPSMDPHWPSLGVWGSPYSPPREDWSVYPVNDVTSSPAAFCSTDYSNLGPVGGGWRRATRSFR

SEQ ID NO: 26985 - protein, 80 aa, Synthetic construct
SNFAAAPAFSHYMGYPHMPSMDPHWPSLGVWGSPYSPPREDWSVYPGPSSTSSPAAFCSTDYSNLGPVGGGWRRATRSFR

SEQ ID NO: 26986 - protein, 80 aa, Synthetic construct
SNFAAAPAFSHYMGYPHMPSMDPHWPSLGVWGSPYSPPREDWSVYPGPSSTMGTVPVNSTDYSNLGPVGGGWRRATRSFR

SEQ ID NO: 26987 - protein, 80 aa, Synthetic construct
SNFAAAPAFSHYMGYPHMPSMDPHWPSLGVWGSPYSPPREDWSVYPGPSSTMGTVPVNDVDYSNLGPVGGGWRRATRSFR

SEQ ID NO: 26988 - protein, 80 aa, Synthetic construct
SNFAAAPAFSHYMGYPHMPSMDPHWPSLGVWGSPYSPPREDWSVYPGPSSTMGTVPVNDVTSSNLGPVGGGWRRATRSFR

SEQ ID NO: 26989 - protein, 80 aa, Synthetic construct
SNFAAAPAFSHYMGYPHMPSMDPHWPSLGVWGSPYSPPREDWSVYPGPSSTMGTVPVNDVTSSPLGPVGGGWRRATRSFR

SEQ ID NO: 26990 - protein, 80 aa, Synthetic construct
SNFAAAPAFSHYMGYPHMPSMDPHWPSLGVWGSPYSPPREDWSVYPGPSSTMGTVPVNDVTSSPAAPVGGGWRRATRSFR

SEQ ID NO: 26991 - protein, 80 aa, Synthetic construct
SNFAAAPAFSHYMGYPHMPSMDPHWPSLGVWGSPYSPPREDWSVYPGPSSTMGTVPVNDVTSSPAAFCGGGWRRATRSFR

SEQ ID NO: 26992 - protein, 80 aa, Synthetic construct
SNFAAAPAFSHYMGYPHMPSMDPHWPSLGVWGSPYSPPREDWSVYPGPSSTMGTVPVNDVTSSPAAFCSTGWRRATRSFR

SEQ ID NO: 26993 - protein, 80 aa, Synthetic construct
PVSPGISDANDHDLREPSGIKNPGGASASARVSSWDSQSYDIEQICLGASNPPWASTLFEIDEFVKIYDLGWRRATRSFR

SEQ ID NO: 26994 - protein, 80 aa, Synthetic construct
PSSPGISDANDHDLREPSGIKNPGGASASARVSSWDSQSYDIEQICLGASNPPWASTLFEIDEFVKIYDLGWRRATRSFR

SEQ ID NO: 26995 - protein, 80 aa, Synthetic construct
PSAIGISDANDHDLREPSGIKNPGGASASARVSSWDSQSYDIEQICLGASNPPWASTLFEIDEFVKIYDLGWRRATRSFR

SEQ ID NO: 26996 - protein, 80 aa, Synthetic construct
PSAITTSDANDHDLREPSGIKNPGGASASARVSSWDSQSYDIEQICLGASNPPWASTLFEIDEFVKIYDLGWRRATRSFR

SEQ ID NO: 26997 - protein, 80 aa, Synthetic construct
PSAITTANANDHDLREPSGIKNPGGASASARVSSWDSQSYDIEQICLGASNPPWASTLFEIDEFVKIYDLGWRRATRSFR

SEQ ID NO: 26998 - protein, 80 aa, Synthetic construct
PSAITTANIRDHDLREPSGIKNPGGASASARVSSWDSQSYDIEQICLGASNPPWASTLFEIDEFVKIYDLGWRRATRSFR

SEQ ID NO: 26999 - protein, 80 aa, Synthetic construct
PSAITTANIRPVDLREPSGIKNPGGASASARVSSWDSQSYDIEQICLGASNPPWASTLFEIDEFVKIYDLGWRRATRSFR

SEQ ID NO: 27000 - protein, 80 aa, Synthetic construct
PSAITTANIRPVSPREPSGIKNPGGASASARVSSWDSQSYDIEQICLGASNPPWASTLFEIDEFVKIYDLGWRRATRSFR

SEQ ID NO: 27001 - protein, 80 aa, Synthetic construct
PSAITTANIRPVSPGIPSGIKNPGGASASARVSSWDSQSYDIEQICLGASNPPWASTLFEIDEFVKIYDLGWRRATRSFR

SEQ ID NO: 27002 - protein, 80 aa, Synthetic construct
PSAITTANIRPVSPGISDGIKNPGGASASARVSSWDSQSYDIEQICLGASNPPWASTLFEIDEFVKIYDLGWRRATRSFR

SEQ ID NO: 27003 - protein, 80 aa, Synthetic construct
PSAITTANIRPVSPGISDANKNPGGASASARVSSWDSQSYDIEQICLGASNPPWASTLFEIDEFVKIYDLGWRRATRSFR

SEQ ID NO: 27004 - protein, 80 aa, Synthetic construct
PSAITTANIRPVSPGISDANDHPGGASASARVSSWDSQSYDIEQICLGASNPPWASTLFEIDEFVKIYDLGWRRATRSFR

SEQ ID NO: 27005 - protein, 80 aa, Synthetic construct
PSAITTANIRPVSPGISDANDHDLGASASARVSSWDSQSYDIEQICLGASNPPWASTLFEIDEFVKIYDLGWRRATRSFR

SEQ ID NO: 27006 - protein, 80 aa, Synthetic construct
PSAITTANIRPVSPGISDANDHDLRESASARVSSWDSQSYDIEQICLGASNPPWASTLFEIDEFVKIYDLGWRRATRSFR

SEQ ID NO: 27007 - protein, 80 aa, Synthetic construct
PSAITTANIRPVSPGISDANDHDLREPSSARVSSWDSQSYDIEQICLGASNPPWASTLFEIDEFVKIYDLGWRRATRSFR

SEQ ID NO: 27008 - protein, 80 aa, Synthetic construct
PSAITTANIRPVSPGISDANDHDLREPSGIRVSSWDSQSYDIEQICLGASNPPWASTLFEIDEFVKIYDLGWRRATRSFR

SEQ ID NO: 27009 - protein, 80 aa, Synthetic construct
PSAITTANIRPVSPGISDANDHDLREPSGIKNSSWDSQSYDIEQICLGASNPPWASTLFEIDEFVKIYDLGWRRATRSFR

SEQ ID NO: 27010 - protein, 80 aa, Synthetic construct
PSAITTANIRPVSPGISDANDHDLREPSGIKNPGWDSQSYDIEQICLGASNPPWASTLFEIDEFVKIYDLGWRRATRSFR

SEQ ID NO: 27011 - protein, 80 aa, Synthetic construct
PSAITTANIRPVSPGISDANDHDLREPSGIKNPGGASQSYDIEQICLGASNPPWASTLFEIDEFVKIYDLGWRRATRSFR

SEQ ID NO: 27012 - protein, 80 aa, Synthetic construct
PSAITTANIRPVSPGISDANDHDLREPSGIKNPGGASASYDIEQICLGASNPPWASTLFEIDEFVKIYDLGWRRATRSFR

SEQ ID NO: 27013 - protein, 80 aa, Synthetic construct
PSAITTANIRPVSPGISDANDHDLREPSGIKNPGGASASADIEQICLGASNPPWASTLFEIDEFVKIYDLGWRRATRSFR

SEQ ID NO: 27014 - protein, 80 aa, Synthetic construct
DHDLREPSGIKNPGGASASARVSSWDSQSYDIEQICLGASNPPWASTLFEIDEFVKIYDLPGEDDTSSLNGWRRATRSFR

SEQ ID NO: 27015 - protein, 80 aa, Synthetic construct
PVDLREPSGIKNPGGASASARVSSWDSQSYDIEQICLGASNPPWASTLFEIDEFVKIYDLPGEDDTSSLNGWRRATRSFR

SEQ ID NO: 27016 - protein, 80 aa, Synthetic construct
PVSPREPSGIKNPGGASASARVSSWDSQSYDIEQICLGASNPPWASTLFEIDEFVKIYDLPGEDDTSSLNGWRRATRSFR

SEQ ID NO: 27017 - protein, 80 aa, Synthetic construct
PVSPGIPSGIKNPGGASASARVSSWDSQSYDIEQICLGASNPPWASTLFEIDEFVKIYDLPGEDDTSSLNGWRRATRSFR

SEQ ID NO: 27018 - protein, 80 aa, Synthetic construct
PVSPGISDGIKNPGGASASARVSSWDSQSYDIEQICLGASNPPWASTLFEIDEFVKIYDLPGEDDTSSLNGWRRATRSFR

SEQ ID NO: 27019 - protein, 80 aa, Synthetic construct
PVSPGISDANKNPGGASASARVSSWDSQSYDIEQICLGASNPPWASTLFEIDEFVKIYDLPGEDDTSSLNGWRRATRSFR

SEQ ID NO: 27020 - protein, 80 aa, Synthetic construct
PVSPGISDANDHPGGASASARVSSWDSQSYDIEQICLGASNPPWASTLFEIDEFVKIYDLPGEDDTSSLNGWRRATRSFR

SEQ ID NO: 27021 - protein, 80 aa, Synthetic construct
PVSPGISDANDHDLGASASARVSSWDSQSYDIEQICLGASNPPWASTLFEIDEFVKIYDLPGEDDTSSLNGWRRATRSFR

SEQ ID NO: 27022 - protein, 80 aa, Synthetic construct
PVSPGISDANDHDLRESASARVSSWDSQSYDIEQICLGASNPPWASTLFEIDEFVKIYDLPGEDDTSSLNGWRRATRSFR

SEQ ID NO: 27023 - protein, 80 aa, Synthetic construct
PVSPGISDANDHDLREPSSARVSSWDSQSYDIEQICLGASNPPWASTLFEIDEFVKIYDLPGEDDTSSLNGWRRATRSFR

SEQ ID NO: 27024 - protein, 80 aa, Synthetic construct
PVSPGISDANDHDLREPSGIRVSSWDSQSYDIEQICLGASNPPWASTLFEIDEFVKIYDLPGEDDTSSLNGWRRATRSFR

SEQ ID NO: 27025 - protein, 80 aa, Synthetic construct
PVSPGISDANDHDLREPSGIKNSSWDSQSYDIEQICLGASNPPWASTLFEIDEFVKIYDLPGEDDTSSLNGWRRATRSFR

SEQ ID NO: 27026 - protein, 80 aa, Synthetic construct
PVSPGISDANDHDLREPSGIKNPGWDSQSYDIEQICLGASNPPWASTLFEIDEFVKIYDLPGEDDTSSLNGWRRATRSFR

SEQ ID NO: 27027 - protein, 80 aa, Synthetic construct
PVSPGISDANDHDLREPSGIKNPGGASQSYDIEQICLGASNPPWASTLFEIDEFVKIYDLPGEDDTSSLNGWRRATRSFR

SEQ ID NO: 27028 - protein, 80 aa, Synthetic construct
PVSPGISDANDHDLREPSGIKNPGGASASYDIEQICLGASNPPWASTLFEIDEFVKIYDLPGEDDTSSLNGWRRATRSFR

SEQ ID NO: 27029 - protein, 80 aa, Synthetic construct
PVSPGISDANDHDLREPSGIKNPGGASASADIEQICLGASNPPWASTLFEIDEFVKIYDLPGEDDTSSLNGWRRATRSFR

SEQ ID NO: 27030 - protein, 80 aa, Synthetic construct
PVSPGISDANDHDLREPSGIKNPGGASASARVEQICLGASNPPWASTLFEIDEFVKIYDLPGEDDTSSLNGWRRATRSFR

SEQ ID NO: 27031 - protein, 80 aa, Synthetic construct
PVSPGISDANDHDLREPSGIKNPGGASASARVSSICLGASNPPWASTLFEIDEFVKIYDLPGEDDTSSLNGWRRATRSFR

SEQ ID NO: 27032 - protein, 80 aa, Synthetic construct
PVSPGISDANDHDLREPSGIKNPGGASASARVSSWDLGASNPPWASTLFEIDEFVKIYDLPGEDDTSSLNGWRRATRSFR

SEQ ID NO: 27033 - protein, 80 aa, Synthetic construct
PVSPGISDANDHDLREPSGIKNPGGASASARVSSWDSQASNPPWASTLFEIDEFVKIYDLPGEDDTSSLNGWRRATRSFR

SEQ ID NO: 27034 - protein, 80 aa, Synthetic construct
PVSPGISDANDHDLREPSGIKNPGGASASARVSSWDSQSYNPPWASTLFEIDEFVKIYDLPGEDDTSSLNGWRRATRSFR

SEQ ID NO: 27035 - protein, 80 aa, Synthetic construct
PVSPGISDANDHDLREPSGIKNPGGASASARVSSWDSQSYDIPWASTLFEIDEFVKIYDLPGEDDTSSLNGWRRATRSFR

SEQ ID NO: 27036 - protein, 80 aa, Synthetic construct
PVSPGISDANDHDLREPSGIKNPGGASASARVSSWDSQSYDIEQICLGFEIDEFVKIYDLPGEDDTSSLNGWRRATRSFR

SEQ ID NO: 27037 - protein, 80 aa, Synthetic construct
PVSPGISDANDHDLREPSGIKNPGGASASARVSSWDSQSYDIEQICLGASNPPWASTLFEIDEFVKIYLNGWRRATRSFR

SEQ ID NO: 27038 - protein, 80 aa, Synthetic construct
QAQENPGYPYSDSSSILGENPHIGIDMIDNDQGSSSPSNDEAAMAVIMSLLEADAGLGGPVDFSDLPWPLGWRRATRSFR

SEQ ID NO: 27039 - protein, 80 aa, Synthetic construct
DIQENPGYPYSDSSSILGENPHIGIDMIDNDQGSSSPSNDEAAMAVIMSLLEADAGLGGPVDFSDLPWPLGWRRATRSFR

SEQ ID NO: 27040 - protein, 80 aa, Synthetic construct
DIPSNPGYPYSDSSSILGENPHIGIDMIDNDQGSSSPSNDEAAMAVIMSLLEADAGLGGPVDFSDLPWPLGWRRATRSFR

SEQ ID NO: 27041 - protein, 80 aa, Synthetic construct
DIPSSGGYPYSDSSSILGENPHIGIDMIDNDQGSSSPSNDEAAMAVIMSLLEADAGLGGPVDFSDLPWPLGWRRATRSFR

SEQ ID NO: 27042 - protein, 80 aa, Synthetic construct
DIPSSGLLPYSDSSSILGENPHIGIDMIDNDQGSSSPSNDEAAMAVIMSLLEADAGLGGPVDFSDLPWPLGWRRATRSFR

SEQ ID NO: 27043 - protein, 80 aa, Synthetic construct
DIPSSGLLSGSDSSSILGENPHIGIDMIDNDQGSSSPSNDEAAMAVIMSLLEADAGLGGPVDFSDLPWPLGWRRATRSFR

SEQ ID NO: 27044 - protein, 80 aa, Synthetic construct
DIPSSGLLSGQASSSILGENPHIGIDMIDNDQGSSSPSNDEAAMAVIMSLLEADAGLGGPVDFSDLPWPLGWRRATRSFR

SEQ ID NO: 27045 - protein, 80 aa, Synthetic construct
DIPSSGLLSGQAQESILGENPHIGIDMIDNDQGSSSPSNDEAAMAVIMSLLEADAGLGGPVDFSDLPWPLGWRRATRSFR

SEQ ID NO: 27046 - protein, 80 aa, Synthetic construct
DIPSSGLLSGQAQENPLGENPHIGIDMIDNDQGSSSPSNDEAAMAVIMSLLEADAGLGGPVDFSDLPWPLGWRRATRSFR

SEQ ID NO: 27047 - protein, 80 aa, Synthetic construct
DIPSSGLLSGQAQENPGYENPHIGIDMIDNDQGSSSPSNDEAAMAVIMSLLEADAGLGGPVDFSDLPWPLGWRRATRSFR

SEQ ID NO: 27048 - protein, 80 aa, Synthetic construct
DIPSSGLLSGQAQENPGYPYPHIGIDMIDNDQGSSSPSNDEAAMAVIMSLLEADAGLGGPVDFSDLPWPLGWRRATRSFR

SEQ ID NO: 27049 - protein, 80 aa, Synthetic construct
DIPSSGLLSGQAQENPGYPYSDSSIDMIDNDQGSSSPSNDEAAMAVIMSLLEADAGLGGPVDFSDLPWPLGWRRATRSFR

SEQ ID NO: 27050 - protein, 80 aa, Synthetic construct
DIPSSGLLSGQAQENPGYPYSDSSSIMIDNDQGSSSPSNDEAAMAVIMSLLEADAGLGGPVDFSDLPWPLGWRRATRSFR

SEQ ID NO: 27051 - protein, 80 aa, Synthetic construct
DIPSSGLLSGQAQENPGYPYSDSSSILGDNDQGSSSPSNDEAAMAVIMSLLEADAGLGGPVDFSDLPWPLGWRRATRSFR

SEQ ID NO: 27052 - protein, 80 aa, Synthetic construct
DIPSSGLLSGQAQENPGYPYSDSSSILGENDQGSSSPSNDEAAMAVIMSLLEADAGLGGPVDFSDLPWPLGWRRATRSFR

SEQ ID NO: 27053 - protein, 80 aa, Synthetic construct
DIPSSGLLSGQAQENPGYPYSDSSSILGENPHGSSSPSNDEAAMAVIMSLLEADAGLGGPVDFSDLPWPLGWRRATRSFR

SEQ ID NO: 27054 - protein, 80 aa, Synthetic construct
DIPSSGLLSGQAQENPGYPYSDSSSILGENPHIGSSPSNDEAAMAVIMSLLEADAGLGGPVDFSDLPWPLGWRRATRSFR

SEQ ID NO: 27055 - protein, 80 aa, Synthetic construct
DIPSSGLLSGQAQENPGYPYSDSSSILGENPHIGIDMIDNDQGSAVIMSLLEADAGLGGPVDFSDLPWPLGWRRATRSFR

SEQ ID NO: 27056 - protein, 80 aa, Synthetic construct
DIPSSGLLSGQAQENPGYPYSDSSSILGENPHIGIDMIDNDQGSSSIMSLLEADAGLGGPVDFSDLPWPLGWRRATRSFR

SEQ ID NO: 27057 - protein, 80 aa, Synthetic construct
DIPSSGLLSGQAQENPGYPYSDSSSILGENPHIGIDMIDNDQGSSSPSNDEAAMAVIMSLVDFSDLPWPLGWRRATRSFR

SEQ ID NO: 27058 - protein, 80 aa, Synthetic construct
DIPSSGLLSGQAQENPGYPYSDSSSILGENPHIGIDMIDNDQGSSSPSNDEAAMAVIMSLLEFSDLPWPLGWRRATRSFR

SEQ ID NO: 27059 - protein, 80 aa, Synthetic construct
DIPSSGLLSGQAQENPGYPYSDSSSILGENPHIGIDMIDNDQGSSSPSNDEAAMAVIMSLLEADDLPWPLGWRRATRSFR

SEQ ID NO: 27060 - protein, 80 aa, Synthetic construct
DIPSSGLLSGQAQENPGYPYSDSSSILGENPHIGIDMIDNDQGSSSPSNDEAAMAVIMSLLEADAGPWPLGWRRATRSFR

SEQ ID NO: 27061 - protein, 80 aa, Synthetic construct
DIPSSGLLSGQAQENPGYPYSDSSSILGENPHIGIDMIDNDQGSSSPSNDEAAMAVIMSLLEADAGLGPLGWRRATRSFR

SEQ ID NO: 27062 - protein, 80 aa, Synthetic construct
VYGGPYGGSQGYGNYVTYGSEASAFYSLNSFDSKDGSGSAHGGLAPAAAAYYPYEPALGQYPYDRYGTMDGWRRATRSFR

SEQ ID NO: 27063 - protein, 80 aa, Synthetic construct
HEGGPYGGSQGYGNYVTYGSEASAFYSLNSFDSKDGSGSAHGGLAPAAAAYYPYEPALGQYPYDRYGTMDGWRRATRSFR

SEQ ID NO: 27064 - protein, 80 aa, Synthetic construct
HELNPYGGSQGYGNYVTYGSEASAFYSLNSFDSKDGSGSAHGGLAPAAAAYYPYEPALGQYPYDRYGTMDGWRRATRSFR

SEQ ID NO: 27065 - protein, 80 aa, Synthetic construct
HELNSAGGSQGYGNYVTYGSEASAFYSLNSFDSKDGSGSAHGGLAPAAAAYYPYEPALGQYPYDRYGTMDGWRRATRSFR

SEQ ID NO: 27066 - protein, 80 aa, Synthetic construct
HELNSAAASQGYGNYVTYGSEASAFYSLNSFDSKDGSGSAHGGLAPAAAAYYPYEPALGQYPYDRYGTMDGWRRATRSFR

SEQ ID NO: 27067 - protein, 80 aa, Synthetic construct
HELNSAAALGGYGNYVTYGSEASAFYSLNSFDSKDGSGSAHGGLAPAAAAYYPYEPALGQYPYDRYGTMDGWRRATRSFR

SEQ ID NO: 27068 - protein, 80 aa, Synthetic construct
HELNSAAALGVYGNYVTYGSEASAFYSLNSFDSKDGSGSAHGGLAPAAAAYYPYEPALGQYPYDRYGTMDGWRRATRSFR

SEQ ID NO: 27069 - protein, 80 aa, Synthetic construct
HELNSAAALGVYGGYVTYGSEASAFYSLNSFDSKDGSGSAHGGLAPAAAAYYPYEPALGQYPYDRYGTMDGWRRATRSFR

SEQ ID NO: 27070 - protein, 80 aa, Synthetic construct
HELNSAAALGVYGGPYTYGSEASAFYSLNSFDSKDGSGSAHGGLAPAAAAYYPYEPALGQYPYDRYGTMDGWRRATRSFR

SEQ ID NO: 27071 - protein, 80 aa, Synthetic construct
HELNSAAALGVYGGPYGGSQGYSAFYSLNSFDSKDGSGSAHGGLAPAAAAYYPYEPALGQYPYDRYGTMDGWRRATRSFR

SEQ ID NO: 27072 - protein, 80 aa, Synthetic construct
HELNSAAALGVYGGPYGGSQGYGNFYSLNSFDSKDGSGSAHGGLAPAAAAYYPYEPALGQYPYDRYGTMDGWRRATRSFR

SEQ ID NO: 27073 - protein, 80 aa, Synthetic construct
HELNSAAALGVYGGPYGGSQGYGNYVTYNSFDSKDGSGSAHGGLAPAAAAYYPYEPALGQYPYDRYGTMDGWRRATRSFR

SEQ ID NO: 27074 - protein, 80 aa, Synthetic construct
HELNSAAALGVYGGPYGGSQGYGNYVTYGSFDSKDGSGSAHGGLAPAAAAYYPYEPALGQYPYDRYGTMDGWRRATRSFR

SEQ ID NO: 27075 - protein, 80 aa, Synthetic construct
HELNSAAALGVYGGPYGGSQGYGNYVTYGSEASADGSGSAHGGLAPAAAAYYPYEPALGQYPYDRYGTMDGWRRATRSFR

SEQ ID NO: 27076 - protein, 80 aa, Synthetic construct
HELNSAAALGVYGGPYGGSQGYGNYVTYGSEASAFYSGSAHGGLAPAAAAYYPYEPALGQYPYDRYGTMDGWRRATRSFR

SEQ ID NO: 27077 - protein, 80 aa, Synthetic construct
HELNSAAALGVYGGPYGGSQGYGNYVTYGSEASAFYSLSAHGGLAPAAAAYYPYEPALGQYPYDRYGTMDGWRRATRSFR

SEQ ID NO: 27078 - protein, 80 aa, Synthetic construct
HELNSAAALGVYGGPYGGSQGYGNYVTYGSEASAFYSLNSHGGLAPAAAAYYPYEPALGQYPYDRYGTMDGWRRATRSFR

SEQ ID NO: 27079 - protein, 80 aa, Synthetic construct
HELNSAAALGVYGGPYGGSQGYGNYVTYGSEASAFYSLNSFDSKAPAAAAYYPYEPALGQYPYDRYGTMDGWRRATRSFR

SEQ ID NO: 27080 - protein, 80 aa, Synthetic construct
HELNSAAALGVYGGPYGGSQGYGNYVTYGSEASAFYSLNSFDSKDGAAAAYYPYEPALGQYPYDRYGTMDGWRRATRSFR

SEQ ID NO: 27081 - protein, 80 aa, Synthetic construct
HELNSAAALGVYGGPYGGSQGYGNYVTYGSEASAFYSLNSFDSKDGSGAAYYPYEPALGQYPYDRYGTMDGWRRATRSFR

SEQ ID NO: 27082 - protein, 80 aa, Synthetic construct
HELNSAAALGVYGGPYGGSQGYGNYVTYGSEASAFYSLNSFDSKDGSGSAYYPYEPALGQYPYDRYGTMDGWRRATRSFR

SEQ ID NO: 27083 - protein, 80 aa, Synthetic construct
HELNSAAALGVYGGPYGGSQGYGNYVTYGSEASAFYSLNSFDSKDGSGSAHGPYEPALGQYPYDRYGTMDGWRRATRSFR

SEQ ID NO: 27084 - protein, 80 aa, Synthetic construct
HELNSAAALGVYGGPYGGSQGYGNYVTYGSEASAFYSLNSFDSKDGSGSAHGGLAPAAAAYYYDRYGTMDGWRRATRSFR

SEQ ID NO: 27085 - protein, 80 aa, Synthetic construct
HELNSAAALGVYGGPYGGSQGYGNYVTYGSEASAFYSLNSFDSKDGSGSAHGGLAPAAAAYYPYRYGTMDGWRRATRSFR

SEQ ID NO: 27086 - protein, 80 aa, Synthetic construct
HELNSAAALGVYGGPYGGSQGYGNYVTYGSEASAFYSLNSFDSKDGSGSAHGGLAPAAAAYYPYEPALMDGWRRATRSFR

SEQ ID NO: 27087 - protein, 80 aa, Synthetic construct
HELNSAAALGVYGGPYGGSQGYGNYVTYGSEASAFYSLNSFDSKDGSGSAHGGLAPAAAAYYPYEPALGQGWRRATRSFR

SEQ ID NO: 27088 - protein, 80 aa, Synthetic construct
NLPMWSNQTWNNSTWSNQTQNIQSWSNHSWNTQTWCTQSWNNQAWNSPFYNCGEESLQSCMHFQPNSPASGWRRATRSFR

SEQ ID NO: 27089 - protein, 80 aa, Synthetic construct
HQPMWSNQTWNNSTWSNQTQNIQSWSNHSWNTQTWCTQSWNNQAWNSPFYNCGEESLQSCMHFQPNSPASGWRRATRSFR

SEQ ID NO: 27090 - protein, 80 aa, Synthetic construct
HQGCWSNQTWNNSTWSNQTQNIQSWSNHSWNTQTWCTQSWNNQAWNSPFYNCGEESLQSCMHFQPNSPASGWRRATRSFR

SEQ ID NO: 27091 - protein, 80 aa, Synthetic construct
HQGCLVNQTWNNSTWSNQTQNIQSWSNHSWNTQTWCTQSWNNQAWNSPFYNCGEESLQSCMHFQPNSPASGWRRATRSFR

SEQ ID NO: 27092 - protein, 80 aa, Synthetic construct
HQGCLVNPTWNNSTWSNQTQNIQSWSNHSWNTQTWCTQSWNNQAWNSPFYNCGEESLQSCMHFQPNSPASGWRRATRSFR

SEQ ID NO: 27093 - protein, 80 aa, Synthetic construct
HQGCLVNPTGNNSTWSNQTQNIQSWSNHSWNTQTWCTQSWNNQAWNSPFYNCGEESLQSCMHFQPNSPASGWRRATRSFR

SEQ ID NO: 27094 - protein, 80 aa, Synthetic construct
HQGCLVNPTGNLSTWSNQTQNIQSWSNHSWNTQTWCTQSWNNQAWNSPFYNCGEESLQSCMHFQPNSPASGWRRATRSFR

SEQ ID NO: 27095 - protein, 80 aa, Synthetic construct
HQGCLVNPTGNLPMWSNQTQNIQSWSNHSWNTQTWCTQSWNNQAWNSPFYNCGEESLQSCMHFQPNSPASGWRRATRSFR

SEQ ID NO: 27096 - protein, 80 aa, Synthetic construct
HQGCLVNPTGNLPMWSNQTWNNQSWSNHSWNTQTWCTQSWNNQAWNSPFYNCGEESLQSCMHFQPNSPASGWRRATRSFR

SEQ ID NO: 27097 - protein, 80 aa, Synthetic construct
HQGCLVNPTGNLPMWSNQTWNNSTWSNHSWNTQTWCTQSWNNQAWNSPFYNCGEESLQSCMHFQPNSPASGWRRATRSFR

SEQ ID NO: 27098 - protein, 80 aa, Synthetic construct
HQGCLVNPTGNLPMWSNQTWNNSTWSNQSWNTQTWCTQSWNNQAWNSPFYNCGEESLQSCMHFQPNSPASGWRRATRSFR

SEQ ID NO: 27099 - protein, 80 aa, Synthetic construct
HQGCLVNPTGNLPMWSNQTWNNSTWSNQTQNTQTWCTQSWNNQAWNSPFYNCGEESLQSCMHFQPNSPASGWRRATRSFR

SEQ ID NO: 27100 - protein, 80 aa, Synthetic construct
HQGCLVNPTGNLPMWSNQTWNNSTWSNQTQNIQTWCTQSWNNQAWNSPFYNCGEESLQSCMHFQPNSPASGWRRATRSFR

SEQ ID NO: 27101 - protein, 80 aa, Synthetic construct
HQGCLVNPTGNLPMWSNQTWNNSTWSNQTQNIQSWCTQSWNNQAWNSPFYNCGEESLQSCMHFQPNSPASGWRRATRSFR

SEQ ID NO: 27102 - protein, 80 aa, Synthetic construct
HQGCLVNPTGNLPMWSNQTWNNSTWSNQTQNIQSWSTQSWNNQAWNSPFYNCGEESLQSCMHFQPNSPASGWRRATRSFR

SEQ ID NO: 27103 - protein, 80 aa, Synthetic construct
HQGCLVNPTGNLPMWSNQTWNNSTWSNQTQNIQSWSNHSWNNQAWNSPFYNCGEESLQSCMHFQPNSPASGWRRATRSFR

SEQ ID NO: 27104 - protein, 80 aa, Synthetic construct
HQGCLVNPTGNLPMWSNQTWNNSTWSNQTQNIQSWSNHSWNTQAWNSPFYNCGEESLQSCMHFQPNSPASGWRRATRSFR

SEQ ID NO: 27105 - protein, 80 aa, Synthetic construct
HQGCLVNPTGNLPMWSNQTWNNSTWSNQTQNIQSWSNHSWNTQTWNSPFYNCGEESLQSCMHFQPNSPASGWRRATRSFR

SEQ ID NO: 27106 - protein, 80 aa, Synthetic construct
HQGCLVNPTGNLPMWSNQTWNNSTWSNQTQNIQSWSNHSWNTQTWCSPFYNCGEESLQSCMHFQPNSPASGWRRATRSFR

SEQ ID NO: 27107 - protein, 80 aa, Synthetic construct
HQGCLVNPTGNLPMWSNQTWNNSTWSNQTQNIQSWSNHSWNTQTWCTQFYNCGEESLQSCMHFQPNSPASGWRRATRSFR

SEQ ID NO: 27108 - protein, 80 aa, Synthetic construct
HQGCLVNPTGNLPMWSNQTWNNSTWSNQTQNIQSWSNHSWNTQTWCTQSWNCGEESLQSCMHFQPNSPASGWRRATRSFR

SEQ ID NO: 27109 - protein, 80 aa, Synthetic construct
HQGCLVNPTGNLPMWSNQTWNNSTWSNQTQNIQSWSNHSWNTQTWCTQSWNNGEESLQSCMHFQPNSPASGWRRATRSFR

SEQ ID NO: 27110 - protein, 80 aa, Synthetic construct
HQGCLVNPTGNLPMWSNQTWNNSTWSNQTQNIQSWSNHSWNTQTWCTQSWNNQAESLQSCMHFQPNSPASGWRRATRSFR

SEQ ID NO: 27111 - protein, 80 aa, Synthetic construct
HQGCLVNPTGNLPMWSNQTWNNSTWSNQTQNIQSWSNHSWNTQTWCTQSWNNQAWNLQSCMHFQPNSPASGWRRATRSFR

SEQ ID NO: 27112 - protein, 80 aa, Synthetic construct
HQGCLVNPTGNLPMWSNQTWNNSTWSNQTQNIQSWSNHSWNTQTWCTQSWNNQAWNSPSCMHFQPNSPASGWRRATRSFR

SEQ ID NO: 27113 - protein, 80 aa, Synthetic construct
HQGCLVNPTGNLPMWSNQTWNNSTWSNQTQNIQSWSNHSWNTQTWCTQSWNNQAWNSPFYMHFQPNSPASGWRRATRSFR

SEQ ID NO: 27114 - protein, 80 aa, Synthetic construct
NNSTWSNQTQNIQSWSNHSWNTQTWCTQSWNNQAWNSPFYNCGEESLQSCMHFQPNSPASDLEAALEAAGGWRRATRSFR

SEQ ID NO: 27115 - protein, 80 aa, Synthetic construct
NLSTWSNQTQNIQSWSNHSWNTQTWCTQSWNNQAWNSPFYNCGEESLQSCMHFQPNSPASDLEAALEAAGGWRRATRSFR

SEQ ID NO: 27116 - protein, 80 aa, Synthetic construct
NLPMWSNQTQNIQSWSNHSWNTQTWCTQSWNNQAWNSPFYNCGEESLQSCMHFQPNSPASDLEAALEAAGGWRRATRSFR

SEQ ID NO: 27117 - protein, 80 aa, Synthetic construct
NLPMWSNQTWNIQSWSNHSWNTQTWCTQSWNNQAWNSPFYNCGEESLQSCMHFQPNSPASDLEAALEAAGGWRRATRSFR

SEQ ID NO: 27118 - protein, 80 aa, Synthetic construct
NLPMWSNQTWNNQSWSNHSWNTQTWCTQSWNNQAWNSPFYNCGEESLQSCMHFQPNSPASDLEAALEAAGGWRRATRSFR

SEQ ID NO: 27119 - protein, 80 aa, Synthetic construct
NLPMWSNQTWNNSTWSNHSWNTQTWCTQSWNNQAWNSPFYNCGEESLQSCMHFQPNSPASDLEAALEAAGGWRRATRSFR

SEQ ID NO: 27120 - protein, 80 aa, Synthetic construct
NLPMWSNQTWNNSTWSNQSWNTQTWCTQSWNNQAWNSPFYNCGEESLQSCMHFQPNSPASDLEAALEAAGGWRRATRSFR

SEQ ID NO: 27121 - protein, 80 aa, Synthetic construct
NLPMWSNQTWNNSTWSNQTQNTQTWCTQSWNNQAWNSPFYNCGEESLQSCMHFQPNSPASDLEAALEAAGGWRRATRSFR

SEQ ID NO: 27122 - protein, 80 aa, Synthetic construct
NLPMWSNQTWNNSTWSNQTQNIQTWCTQSWNNQAWNSPFYNCGEESLQSCMHFQPNSPASDLEAALEAAGGWRRATRSFR

SEQ ID NO: 27123 - protein, 80 aa, Synthetic construct
NLPMWSNQTWNNSTWSNQTQNIQSWCTQSWNNQAWNSPFYNCGEESLQSCMHFQPNSPASDLEAALEAAGGWRRATRSFR

SEQ ID NO: 27124 - protein, 80 aa, Synthetic construct
NLPMWSNQTWNNSTWSNQTQNIQSWSTQSWNNQAWNSPFYNCGEESLQSCMHFQPNSPASDLEAALEAAGGWRRATRSFR

SEQ ID NO: 27125 - protein, 80 aa, Synthetic construct
NLPMWSNQTWNNSTWSNQTQNIQSWSNHSWNNQAWNSPFYNCGEESLQSCMHFQPNSPASDLEAALEAAGGWRRATRSFR

SEQ ID NO: 27126 - protein, 80 aa, Synthetic construct
NLPMWSNQTWNNSTWSNQTQNIQSWSNHSWNTQAWNSPFYNCGEESLQSCMHFQPNSPASDLEAALEAAGGWRRATRSFR

SEQ ID NO: 27127 - protein, 80 aa, Synthetic construct
NLPMWSNQTWNNSTWSNQTQNIQSWSNHSWNTQTWNSPFYNCGEESLQSCMHFQPNSPASDLEAALEAAGGWRRATRSFR

SEQ ID NO: 27128 - protein, 80 aa, Synthetic construct
NLPMWSNQTWNNSTWSNQTQNIQSWSNHSWNTQTWCSPFYNCGEESLQSCMHFQPNSPASDLEAALEAAGGWRRATRSFR

SEQ ID NO: 27129 - protein, 80 aa, Synthetic construct
NLPMWSNQTWNNSTWSNQTQNIQSWSNHSWNTQTWCTQFYNCGEESLQSCMHFQPNSPASDLEAALEAAGGWRRATRSFR

SEQ ID NO: 27130 - protein, 80 aa, Synthetic construct
NLPMWSNQTWNNSTWSNQTQNIQSWSNHSWNTQTWCTQSWNCGEESLQSCMHFQPNSPASDLEAALEAAGGWRRATRSFR

SEQ ID NO: 27131 - protein, 80 aa, Synthetic construct
NLPMWSNQTWNNSTWSNQTQNIQSWSNHSWNTQTWCTQSWNNGEESLQSCMHFQPNSPASDLEAALEAAGGWRRATRSFR

SEQ ID NO: 27132 - protein, 80 aa, Synthetic construct
NLPMWSNQTWNNSTWSNQTQNIQSWSNHSWNTQTWCTQSWNNQAESLQSCMHFQPNSPASDLEAALEAAGGWRRATRSFR

SEQ ID NO: 27133 - protein, 80 aa, Synthetic construct
NLPMWSNQTWNNSTWSNQTQNIQSWSNHSWNTQTWCTQSWNNQAWNLQSCMHFQPNSPASDLEAALEAAGGWRRATRSFR

SEQ ID NO: 27134 - protein, 80 aa, Synthetic construct
NLPMWSNQTWNNSTWSNQTQNIQSWSNHSWNTQTWCTQSWNNQAWNSPSCMHFQPNSPASDLEAALEAAGGWRRATRSFR

SEQ ID NO: 27135 - protein, 80 aa, Synthetic construct
NLPMWSNQTWNNSTWSNQTQNIQSWSNHSWNTQTWCTQSWNNQAWNSPFYMHFQPNSPASDLEAALEAAGGWRRATRSFR

SEQ ID NO: 27136 - protein, 80 aa, Synthetic construct
NLPMWSNQTWNNSTWSNQTQNIQSWSNHSWNTQTWCTQSWNNQAWNSPFYNCGEESLQSCMHEAALEAAGGWRRATRSFR

SEQ ID NO: 27137 - protein, 80 aa, Synthetic construct
NLPMWSNQTWNNSTWSNQTQNIQSWSNHSWNTQTWCTQSWNNQAWNSPFYNCGEESLQSCMHFQALEAAGGWRRATRSFR

SEQ ID NO: 27138 - protein, 80 aa, Synthetic construct
NLPMWSNQTWNNSTWSNQTQNIQSWSNHSWNTQTWCTQSWNNQAWNSPFYNCGEESLQSCMHFQPNEAAGGWRRATRSFR

SEQ ID NO: 27139 - protein, 80 aa, Synthetic construct
NLPMWSNQTWNNSTWSNQTQNIQSWSNHSWNTQTWCTQSWNNQAWNSPFYNCGEESLQSCMHFQPNSPAGGWRRATRSFR

SEQ ID NO: 27140 - protein, 80 aa, Synthetic construct
NTQTWCTQSWNNQAWNSPFYNCGEESLQSCMHFQPNSPASDLEAALEAAGEGLNVIQQTTRYFSTPQTMDGWRRATRSFR

SEQ ID NO: 27141 - protein, 80 aa, Synthetic construct
NIQTWCTQSWNNQAWNSPFYNCGEESLQSCMHFQPNSPASDLEAALEAAGEGLNVIQQTTRYFSTPQTMDGWRRATRSFR

SEQ ID NO: 27142 - protein, 80 aa, Synthetic construct
NIQSWCTQSWNNQAWNSPFYNCGEESLQSCMHFQPNSPASDLEAALEAAGEGLNVIQQTTRYFSTPQTMDGWRRATRSFR

SEQ ID NO: 27143 - protein, 80 aa, Synthetic construct
NIQSWSTQSWNNQAWNSPFYNCGEESLQSCMHFQPNSPASDLEAALEAAGEGLNVIQQTTRYFSTPQTMDGWRRATRSFR

SEQ ID NO: 27144 - protein, 80 aa, Synthetic construct
NIQSWSNHSWNNQAWNSPFYNCGEESLQSCMHFQPNSPASDLEAALEAAGEGLNVIQQTTRYFSTPQTMDGWRRATRSFR

SEQ ID NO: 27145 - protein, 80 aa, Synthetic construct
NIQSWSNHSWNTQAWNSPFYNCGEESLQSCMHFQPNSPASDLEAALEAAGEGLNVIQQTTRYFSTPQTMDGWRRATRSFR

SEQ ID NO: 27146 - protein, 80 aa, Synthetic construct
NIQSWSNHSWNTQTWNSPFYNCGEESLQSCMHFQPNSPASDLEAALEAAGEGLNVIQQTTRYFSTPQTMDGWRRATRSFR

SEQ ID NO: 27147 - protein, 80 aa, Synthetic construct
NIQSWSNHSWNTQTWCSPFYNCGEESLQSCMHFQPNSPASDLEAALEAAGEGLNVIQQTTRYFSTPQTMDGWRRATRSFR

SEQ ID NO: 27148 - protein, 80 aa, Synthetic construct
NIQSWSNHSWNTQTWCTQFYNCGEESLQSCMHFQPNSPASDLEAALEAAGEGLNVIQQTTRYFSTPQTMDGWRRATRSFR

SEQ ID NO: 27149 - protein, 80 aa, Synthetic construct
NIQSWSNHSWNTQTWCTQSWNCGEESLQSCMHFQPNSPASDLEAALEAAGEGLNVIQQTTRYFSTPQTMDGWRRATRSFR

SEQ ID NO: 27150 - protein, 80 aa, Synthetic construct
NIQSWSNHSWNTQTWCTQSWNNQAWNLQSCMHFQPNSPASDLEAALEAAGEGLNVIQQTTRYFSTPQTMDGWRRATRSFR

SEQ ID NO: 27151 - protein, 80 aa, Synthetic construct
NIQSWSNHSWNTQTWCTQSWNNQAWNSPSCMHFQPNSPASDLEAALEAAGEGLNVIQQTTRYFSTPQTMDGWRRATRSFR

SEQ ID NO: 27152 - protein, 80 aa, Synthetic construct
NIQSWSNHSWNTQTWCTQSWNNQAWNSPFYMHFQPNSPASDLEAALEAAGEGLNVIQQTTRYFSTPQTMDGWRRATRSFR

SEQ ID NO: 27153 - protein, 80 aa, Synthetic construct
NIQSWSNHSWNTQTWCTQSWNNQAWNSPFYNCGEESLQSCMHEAALEAAGEGLNVIQQTTRYFSTPQTMDGWRRATRSFR

SEQ ID NO: 27154 - protein, 80 aa, Synthetic construct
NIQSWSNHSWNTQTWCTQSWNNQAWNSPFYNCGEESLQSCMHFQALEAAGEGLNVIQQTTRYFSTPQTMDGWRRATRSFR

SEQ ID NO: 27155 - protein, 80 aa, Synthetic construct
NIQSWSNHSWNTQTWCTQSWNNQAWNSPFYNCGEESLQSCMHFQPNEAAGEGLNVIQQTTRYFSTPQTMDGWRRATRSFR

SEQ ID NO: 27156 - protein, 80 aa, Synthetic construct
NIQSWSNHSWNTQTWCTQSWNNQAWNSPFYNCGEESLQSCMHFQPNSPAGEGLNVIQQTTRYFSTPQTMDGWRRATRSFR

SEQ ID NO: 27157 - protein, 80 aa, Synthetic construct
NIQSWSNHSWNTQTWCTQSWNNQAWNSPFYNCGEESLQSCMHFQPNSPASEGLNVIQQTTRYFSTPQTMDGWRRATRSFR

SEQ ID NO: 27158 - protein, 80 aa, Synthetic construct
NIQSWSNHSWNTQTWCTQSWNNQAWNSPFYNCGEESLQSCMHFQPNSPASDLLNVIQQTTRYFSTPQTMDGWRRATRSFR

SEQ ID NO: 27159 - protein, 80 aa, Synthetic construct
NIQSWSNHSWNTQTWCTQSWNNQAWNSPFYNCGEESLQSCMHFQPNSPASDLEAVIQQTTRYFSTPQTMDGWRRATRSFR

SEQ ID NO: 27160 - protein, 80 aa, Synthetic construct
NIQSWSNHSWNTQTWCTQSWNNQAWNSPFYNCGEESLQSCMHFQPNSPASDLEAALEAAGEGFSTPQTMDGWRRATRSFR

SEQ ID NO: 27161 - protein, 80 aa, Synthetic construct
NIQSWSNHSWNTQTWCTQSWNNQAWNSPFYNCGEESLQSCMHFQPNSPASDLEAALEAAGEGLNTPQTMDGWRRATRSFR

SEQ ID NO: 27162 - protein, 80 aa, Synthetic construct
NIQSWSNHSWNTQTWCTQSWNNQAWNSPFYNCGEESLQSCMHFQPNSPASDLEAALEAAGEGLNVIQTMDGWRRATRSFR

SEQ ID NO: 27163 - protein, 80 aa, Synthetic construct
NIQSWSNHSWNTQTWCTQSWNNQAWNSPFYNCGEESLQSCMHFQPNSPASDLEAALEAAGEGLNVIQQMDGWRRATRSFR

SEQ ID NO: 27164 - protein, 80 aa, Synthetic construct
NIQSWSNHSWNTQTWCTQSWNNQAWNSPFYNCGEESLQSCMHFQPNSPASDLEAALEAAGEGLNVIQQTTGWRRATRSFR

SEQ ID NO: 27165 - protein, 80 aa, Synthetic construct
NNQAWNSPFYNCGEESLQSCMHFQPNSPASDLEAALEAAGEGLNVIQQTTRYFSTPQTMDLFLNYSMNMQGWRRATRSFR

SEQ ID NO: 27166 - protein, 80 aa, Synthetic construct
NTQAWNSPFYNCGEESLQSCMHFQPNSPASDLEAALEAAGEGLNVIQQTTRYFSTPQTMDLFLNYSMNMQGWRRATRSFR

SEQ ID NO: 27167 - protein, 80 aa, Synthetic construct
NTQTWNSPFYNCGEESLQSCMHFQPNSPASDLEAALEAAGEGLNVIQQTTRYFSTPQTMDLFLNYSMNMQGWRRATRSFR

SEQ ID NO: 27168 - protein, 80 aa, Synthetic construct
NTQTWCSPFYNCGEESLQSCMHFQPNSPASDLEAALEAAGEGLNVIQQTTRYFSTPQTMDLFLNYSMNMQGWRRATRSFR

SEQ ID NO: 27169 - protein, 80 aa, Synthetic construct
NTQTWCTQFYNCGEESLQSCMHFQPNSPASDLEAALEAAGEGLNVIQQTTRYFSTPQTMDLFLNYSMNMQGWRRATRSFR

SEQ ID NO: 27170 - protein, 80 aa, Synthetic construct
NTQTWCTQSWNCGEESLQSCMHFQPNSPASDLEAALEAAGEGLNVIQQTTRYFSTPQTMDLFLNYSMNMQGWRRATRSFR

SEQ ID NO: 27171 - protein, 80 aa, Synthetic construct
NTQTWCTQSWNNGEESLQSCMHFQPNSPASDLEAALEAAGEGLNVIQQTTRYFSTPQTMDLFLNYSMNMQGWRRATRSFR

SEQ ID NO: 27172 - protein, 80 aa, Synthetic construct
NTQTWCTQSWNNQAESLQSCMHFQPNSPASDLEAALEAAGEGLNVIQQTTRYFSTPQTMDLFLNYSMNMQGWRRATRSFR

SEQ ID NO: 27173 - protein, 80 aa, Synthetic construct
NTQTWCTQSWNNQAWNLQSCMHFQPNSPASDLEAALEAAGEGLNVIQQTTRYFSTPQTMDLFLNYSMNMQGWRRATRSFR

SEQ ID NO: 27174 - protein, 80 aa, Synthetic construct
NTQTWCTQSWNNQAWNSPSCMHFQPNSPASDLEAALEAAGEGLNVIQQTTRYFSTPQTMDLFLNYSMNMQGWRRATRSFR

SEQ ID NO: 27175 - protein, 80 aa, Synthetic construct
NTQTWCTQSWNNQAWNSPFYNCGEESLQSCMHEAALEAAGEGLNVIQQTTRYFSTPQTMDLFLNYSMNMQGWRRATRSFR

SEQ ID NO: 27176 - protein, 80 aa, Synthetic construct
NTQTWCTQSWNNQAWNSPFYNCGEESLQSCMHFQPNSPASEGLNVIQQTTRYFSTPQTMDLFLNYSMNMQGWRRATRSFR

SEQ ID NO: 27177 - protein, 80 aa, Synthetic construct
NTQTWCTQSWNNQAWNSPFYNCGEESLQSCMHFQPNSPASDLEAALEAAGEGFSTPQTMDLFLNYSMNMQGWRRATRSFR

SEQ ID NO: 27178 - protein, 80 aa, Synthetic construct
NTQTWCTQSWNNQAWNSPFYNCGEESLQSCMHFQPNSPASDLEAALEAAGEGLNTPQTMDLFLNYSMNMQGWRRATRSFR

SEQ ID NO: 27179 - protein, 80 aa, Synthetic construct
NTQTWCTQSWNNQAWNSPFYNCGEESLQSCMHFQPNSPASDLEAALEAAGEGLNVIQQTTLFLNYSMNMQGWRRATRSFR

SEQ ID NO: 27180 - protein, 80 aa, Synthetic construct
NTQTWCTQSWNNQAWNSPFYNCGEESLQSCMHFQPNSPASDLEAALEAAGEGLNVIQQTTRYLNYSMNMQGWRRATRSFR

SEQ ID NO: 27181 - protein, 80 aa, Synthetic construct
NTQTWCTQSWNNQAWNSPFYNCGEESLQSCMHFQPNSPASDLEAALEAAGEGLNVIQQTTRYFSYSMNMQGWRRATRSFR

SEQ ID NO: 27182 - protein, 80 aa, Synthetic construct
NTQTWCTQSWNNQAWNSPFYNCGEESLQSCMHFQPNSPASDLEAALEAAGEGLNVIQQTTRYFSTPMNMQGWRRATRSFR

SEQ ID NO: 27183 - protein, 80 aa, Synthetic construct
NTQTWCTQSWNNQAWNSPFYNCGEESLQSCMHFQPNSPASDLEAALEAAGEGLNVIQQTTRYFSTPQTMQGWRRATRSFR

SEQ ID NO: 27184 - protein, 80 aa, Synthetic construct
WNSPFYNCGEESLQSCMHFQPNSPASDLEAALEAAGEGLNVIQQTTRYFSTPQTMDLFLNYSMNMQPEDVGWRRATRSFR

SEQ ID NO: 27185 - protein, 80 aa, Synthetic construct
WCSPFYNCGEESLQSCMHFQPNSPASDLEAALEAAGEGLNVIQQTTRYFSTPQTMDLFLNYSMNMQPEDVGWRRATRSFR

SEQ ID NO: 27186 - protein, 80 aa, Synthetic construct
WCTQFYNCGEESLQSCMHFQPNSPASDLEAALEAAGEGLNVIQQTTRYFSTPQTMDLFLNYSMNMQPEDVGWRRATRSFR

SEQ ID NO: 27187 - protein, 80 aa, Synthetic construct
WCTQSWNCGEESLQSCMHFQPNSPASDLEAALEAAGEGLNVIQQTTRYFSTPQTMDLFLNYSMNMQPEDVGWRRATRSFR

SEQ ID NO: 27188 - protein, 80 aa, Synthetic construct
WCTQSWNNGEESLQSCMHFQPNSPASDLEAALEAAGEGLNVIQQTTRYFSTPQTMDLFLNYSMNMQPEDVGWRRATRSFR

SEQ ID NO: 27189 - protein, 80 aa, Synthetic construct
WCTQSWNNQAESLQSCMHFQPNSPASDLEAALEAAGEGLNVIQQTTRYFSTPQTMDLFLNYSMNMQPEDVGWRRATRSFR

SEQ ID NO: 27190 - protein, 80 aa, Synthetic construct
WCTQSWNNQAWNLQSCMHFQPNSPASDLEAALEAAGEGLNVIQQTTRYFSTPQTMDLFLNYSMNMQPEDVGWRRATRSFR

SEQ ID NO: 27191 - protein, 80 aa, Synthetic construct
WCTQSWNNQAWNSPSCMHFQPNSPASDLEAALEAAGEGLNVIQQTTRYFSTPQTMDLFLNYSMNMQPEDVGWRRATRSFR

SEQ ID NO: 27192 - protein, 80 aa, Synthetic construct
WCTQSWNNQAWNSPFYNCGEESLQSCMHFQPNSPASDLEAALEAAGEGFSTPQTMDLFLNYSMNMQPEDVGWRRATRSFR

SEQ ID NO: 27193 - protein, 80 aa, Synthetic construct
WCTQSWNNQAWNSPFYNCGEESLQSCMHFQPNSPASDLEAALEAAGEGLNTPQTMDLFLNYSMNMQPEDVGWRRATRSFR

SEQ ID NO: 27194 - protein, 80 aa, Synthetic construct
WCTQSWNNQAWNSPFYNCGEESLQSCMHFQPNSPASDLEAALEAAGEGLNVIQQTTLFLNYSMNMQPEDVGWRRATRSFR

SEQ ID NO: 27195 - protein, 80 aa, Synthetic construct
WCTQSWNNQAWNSPFYNCGEESLQSCMHFQPNSPASDLEAALEAAGEGLNVIQQTTRYLNYSMNMQPEDVGWRRATRSFR

SEQ ID NO: 27196 - protein, 80 aa, Synthetic construct
WCTQSWNNQAWNSPFYNCGEESLQSCMHFQPNSPASDLEAALEAAGEGLNVIQQTTRYFSYSMNMQPEDVGWRRATRSFR

SEQ ID NO: 27197 - protein, 80 aa, Synthetic construct
WCTQSWNNQAWNSPFYNCGEESLQSCMHFQPNSPASDLEAALEAAGEGLNVIQQTTRYFSTPMNMQPEDVGWRRATRSFR

SEQ ID NO: 27198 - protein, 80 aa, Synthetic construct
WCTQSWNNQAWNSPFYNCGEESLQSCMHFQPNSPASDLEAALEAAGEGLNVIQQTTRYFSTPQTMQPEDVGWRRATRSFR

SEQ ID NO: 27199 - protein, 80 aa, Synthetic construct
WCTQSWNNQAWNSPFYNCGEESLQSCMHFQPNSPASDLEAALEAAGEGLNVIQQTTRYFSTPQTMDPEDVGWRRATRSFR

SEQ ID NO: 27200 - protein, 80 aa, Synthetic construct
WCTQSWNNQAWNSPFYNCGEESLQSCMHFQPNSPASDLEAALEAAGEGLNVIQQTTRYFSTPQTMDLFDVGWRRATRSFR

SEQ ID NO: 27201 - protein, 80 aa, Synthetic construct
WCTQSWNNQAWNSPFYNCGEESLQSCMHFQPNSPASDLEAALEAAGEGLNVIQQTTRYFSTPQTMDLFLNGWRRATRSFR

SEQ ID NO: 27202 - protein, 80 aa, Synthetic construct
DVLASYSIFQELQLVHDTGYFSALPSELERYLQTEPRRISETFGEDLDCFLHASPPPCIEESFRRLDPLLGWRRATRSFR

SEQ ID NO: 27203 - protein, 80 aa, Synthetic construct
DVLASYSIFQELQLVHDTGYFSALPSLEERYLQTEPRRISETFGEDLDCFLHASPPPCIEESFRRLDPLLGWRRATRSFR

SEQ ID NO: 27204 - protein, 80 aa, Synthetic construct
DVLASYSIFQELQLVHDTGYFSALPSLEETYLQTEPRRISETFGEDLDCFLHASPPPCIEESFRRLDPLLGWRRATRSFR

SEQ ID NO: 27205 - protein, 80 aa, Synthetic construct
DVLASYSIFQELQLVHDTGYFSALPSLEETWQQTEPRRISETFGEDLDCFLHASPPPCIEESFRRLDPLLGWRRATRSFR

SEQ ID NO: 27206 - protein, 80 aa, Synthetic construct
DVLASYSIFQELQLVHDTGYFSALPSLEETWQQTCLELERYLFGEDLDCFLHASPPPCIEESFRRLDPLLGWRRATRSFR

SEQ ID NO: 27207 - protein, 80 aa, Synthetic construct
DVLASYSIFQELQLVHDTGYFSALPSLEETWQQTCLELERYLQTEDLDCFLHASPPPCIEESFRRLDPLLGWRRATRSFR

SEQ ID NO: 27208 - protein, 80 aa, Synthetic construct
DVLASYSIFQELQLVHDTGYFSALPSLEETWQQTCLELERYLQTEPLDCFLHASPPPCIEESFRRLDPLLGWRRATRSFR

SEQ ID NO: 27209 - protein, 80 aa, Synthetic construct
DVLASYSIFQELQLVHDTGYFSALPSLEETWQQTCLELERYLQTEPRRCFLHASPPPCIEESFRRLDPLLGWRRATRSFR

SEQ ID NO: 27210 - protein, 80 aa, Synthetic construct
DVLASYSIFQELQLVHDTGYFSALPSLEETWQQTCLELERYLQTEPRRISLHASPPPCIEESFRRLDPLLGWRRATRSFR

SEQ ID NO: 27211 - protein, 80 aa, Synthetic construct
DVLASYSIFQELQLVHDTGYFSALPSLEETWQQTCLELERYLQTEPRRISETASPPPCIEESFRRLDPLLGWRRATRSFR

SEQ ID NO: 27212 - protein, 80 aa, Synthetic construct
DVLASYSIFQELQLVHDTGYFSALPSLEETWQQTCLELERYLQTEPRRISETFGPPPCIEESFRRLDPLLGWRRATRSFR

SEQ ID NO: 27213 - protein, 80 aa, Synthetic construct
DVLASYSIFQELQLVHDTGYFSALPSLEETWQQTCLELERYLQTEPRRISETFGEDPCIEESFRRLDPLLGWRRATRSFR

SEQ ID NO: 27214 - protein, 80 aa, Synthetic construct
DVLASYSIFQELQLVHDTGYFSALPSLEETWQQTCLELERYLQTEPRRISETFGEDLDIEESFRRLDPLLGWRRATRSFR

SEQ ID NO: 27215 - protein, 80 aa, Synthetic construct
DVLASYSIFQELQLVHDTGYFSALPSLEETWQQTCLELERYLQTEPRRISETFGEDLDCFESFRRLDPLLGWRRATRSFR

SEQ ID NO: 27216 - protein, 80 aa, Synthetic construct
DVLASYSIFQELQLVHDTGYFSALPSLEETWQQTCLELERYLQTEPRRISETFGEDLDCFLHFRRLDPLLGWRRATRSFR

SEQ ID NO: 27217 - protein, 80 aa, Synthetic construct
DVLASYSIFQELQLVHDTGYFSALPSLEETWQQTCLELERYLQTEPRRISETFGEDLDCFLHASRLDPLLGWRRATRSFR

SEQ ID NO: 27218 - protein, 80 aa, Synthetic construct
DVLASYSIFQELQLVHDTGYFSALPSLEETWQQTCLELERYLQTEPRRISETFGEDLDCFLHASPPDPLLGWRRATRSFR

SEQ ID NO: 27219 - protein, 80 aa, Synthetic construct
DVLASYSIFQELQLVHDTGYFSALPSLEETWQQTCLELERYLQTEPRRISETFGEDLDCFLHASPPPCLLGWRRATRSFR

SEQ ID NO: 27220 - protein, 80 aa, Synthetic construct
DVLASYSIFQELQLVHDTGYFSALPSLEETWQQTCLELERYLQTEPRRISETFGEDLDCFLHASPPPCIEGWRRATRSFR

SEQ ID NO: 27221 - protein, 80 aa, Synthetic construct
FSALPSLEETWQQTCLELERYLQTEPRRISETFGEDLDCFLHASPPPCIEESFRRLDPLLLPVEAAICEKGWRRATRSFR

SEQ ID NO: 27222 - protein, 80 aa, Synthetic construct
ELALPSLEETWQQTCLELERYLQTEPRRISETFGEDLDCFLHASPPPCIEESFRRLDPLLLPVEAAICEKGWRRATRSFR

SEQ ID NO: 27223 - protein, 80 aa, Synthetic construct
ELQLPSLEETWQQTCLELERYLQTEPRRISETFGEDLDCFLHASPPPCIEESFRRLDPLLLPVEAAICEKGWRRATRSFR

SEQ ID NO: 27224 - protein, 80 aa, Synthetic construct
ELQLVHLEETWQQTCLELERYLQTEPRRISETFGEDLDCFLHASPPPCIEESFRRLDPLLLPVEAAICEKGWRRATRSFR

SEQ ID NO: 27225 - protein, 80 aa, Synthetic construct
ELQLVHDTETWQQTCLELERYLQTEPRRISETFGEDLDCFLHASPPPCIEESFRRLDPLLLPVEAAICEKGWRRATRSFR

SEQ ID NO: 27226 - protein, 80 aa, Synthetic construct
ELQLVHDTGYFSQTCLELERYLQTEPRRISETFGEDLDCFLHASPPPCIEESFRRLDPLLLPVEAAICEKGWRRATRSFR

SEQ ID NO: 27227 - protein, 80 aa, Synthetic construct
ELQLVHDTGYFSALPSELERYLQTEPRRISETFGEDLDCFLHASPPPCIEESFRRLDPLLLPVEAAICEKGWRRATRSFR

SEQ ID NO: 27228 - protein, 80 aa, Synthetic construct
ELQLVHDTGYFSALPSLEERYLQTEPRRISETFGEDLDCFLHASPPPCIEESFRRLDPLLLPVEAAICEKGWRRATRSFR

SEQ ID NO: 27229 - protein, 80 aa, Synthetic construct
ELQLVHDTGYFSALPSLEETYLQTEPRRISETFGEDLDCFLHASPPPCIEESFRRLDPLLLPVEAAICEKGWRRATRSFR

SEQ ID NO: 27230 - protein, 80 aa, Synthetic construct
ELQLVHDTGYFSALPSLEETWQQTEPRRISETFGEDLDCFLHASPPPCIEESFRRLDPLLLPVEAAICEKGWRRATRSFR

SEQ ID NO: 27231 - protein, 80 aa, Synthetic construct
ELQLVHDTGYFSALPSLEETWQQTCLRRISETFGEDLDCFLHASPPPCIEESFRRLDPLLLPVEAAICEKGWRRATRSFR

SEQ ID NO: 27232 - protein, 80 aa, Synthetic construct
ELQLVHDTGYFSALPSLEETWQQTCLELISETFGEDLDCFLHASPPPCIEESFRRLDPLLLPVEAAICEKGWRRATRSFR

SEQ ID NO: 27233 - protein, 80 aa, Synthetic construct
ELQLVHDTGYFSALPSLEETWQQTCLELERETFGEDLDCFLHASPPPCIEESFRRLDPLLLPVEAAICEKGWRRATRSFR

SEQ ID NO: 27234 - protein, 80 aa, Synthetic construct
ELQLVHDTGYFSALPSLEETWQQTCLELERYLFGEDLDCFLHASPPPCIEESFRRLDPLLLPVEAAICEKGWRRATRSFR

SEQ ID NO: 27235 - protein, 80 aa, Synthetic construct
ELQLVHDTGYFSALPSLEETWQQTCLELERYLQTEDLDCFLHASPPPCIEESFRRLDPLLLPVEAAICEKGWRRATRSFR

SEQ ID NO: 27236 - protein, 80 aa, Synthetic construct
ELQLVHDTGYFSALPSLEETWQQTCLELERYLQTEPLDCFLHASPPPCIEESFRRLDPLLLPVEAAICEKGWRRATRSFR

SEQ ID NO: 27237 - protein, 80 aa, Synthetic construct
ELQLVHDTGYFSALPSLEETWQQTCLELERYLQTEPRRCFLHASPPPCIEESFRRLDPLLLPVEAAICEKGWRRATRSFR

SEQ ID NO: 27238 - protein, 80 aa, Synthetic construct
ELQLVHDTGYFSALPSLEETWQQTCLELERYLQTEPRRISLHASPPPCIEESFRRLDPLLLPVEAAICEKGWRRATRSFR

SEQ ID NO: 27239 - protein, 80 aa, Synthetic construct
ELQLVHDTGYFSALPSLEETWQQTCLELERYLQTEPRRISETASPPPCIEESFRRLDPLLLPVEAAICEKGWRRATRSFR

SEQ ID NO: 27240 - protein, 80 aa, Synthetic construct
ELQLVHDTGYFSALPSLEETWQQTCLELERYLQTEPRRISETFGPPPCIEESFRRLDPLLLPVEAAICEKGWRRATRSFR

SEQ ID NO: 27241 - protein, 80 aa, Synthetic construct
ELQLVHDTGYFSALPSLEETWQQTCLELERYLQTEPRRISETFGEDPCIEESFRRLDPLLLPVEAAICEKGWRRATRSFR

SEQ ID NO: 27242 - protein, 80 aa, Synthetic construct
ELQLVHDTGYFSALPSLEETWQQTCLELERYLQTEPRRISETFGEDLDCFLHASPPPCIELPVEAAICEKGWRRATRSFR

SEQ ID NO: 27243 - protein, 80 aa, Synthetic construct
ELQLVHDTGYFSALPSLEETWQQTCLELERYLQTEPRRISETFGEDLDCFLHASPPPCIEESVEAAICEKGWRRATRSFR

SEQ ID NO: 27244 - protein, 80 aa, Synthetic construct
ELQLVHDTGYFSALPSLEETWQQTCLELERYLQTEPRRISETFGEDLDCFLHASPPPCIEESFRRLDPEKGWRRATRSFR

SEQ ID NO: 27245 - protein, 80 aa, Synthetic construct
FSALPSLEETWQQTCLRRISETFGEDLDCFLHASPPPCIEESFRRLDPLLLPVEAAICEKSSAVDILLSRGWRRATRSFR

SEQ ID NO: 27246 - protein, 80 aa, Synthetic construct
FSALPSLEETWQQTCLELISETFGEDLDCFLHASPPPCIEESFRRLDPLLLPVEAAICEKSSAVDILLSRGWRRATRSFR

SEQ ID NO: 27247 - protein, 80 aa, Synthetic construct
FSALPSLEETWQQTCLELERETFGEDLDCFLHASPPPCIEESFRRLDPLLLPVEAAICEKSSAVDILLSRGWRRATRSFR

SEQ ID NO: 27248 - protein, 80 aa, Synthetic construct
FSALPSLEETWQQTCLELERYLFGEDLDCFLHASPPPCIEESFRRLDPLLLPVEAAICEKSSAVDILLSRGWRRATRSFR

SEQ ID NO: 27249 - protein, 80 aa, Synthetic construct
FSALPSLEETWQQTCLELERYLQTEDLDCFLHASPPPCIEESFRRLDPLLLPVEAAICEKSSAVDILLSRGWRRATRSFR

SEQ ID NO: 27250 - protein, 80 aa, Synthetic construct
FSALPSLEETWQQTCLELERYLQTEPLDCFLHASPPPCIEESFRRLDPLLLPVEAAICEKSSAVDILLSRGWRRATRSFR

SEQ ID NO: 27251 - protein, 80 aa, Synthetic construct
FSALPSLEETWQQTCLELERYLQTEPRRCFLHASPPPCIEESFRRLDPLLLPVEAAICEKSSAVDILLSRGWRRATRSFR

SEQ ID NO: 27252 - protein, 80 aa, Synthetic construct
FSALPSLEETWQQTCLELERYLQTEPRRISLHASPPPCIEESFRRLDPLLLPVEAAICEKSSAVDILLSRGWRRATRSFR

SEQ ID NO: 27253 - protein, 80 aa, Synthetic construct
FSALPSLEETWQQTCLELERYLQTEPRRISETASPPPCIEESFRRLDPLLLPVEAAICEKSSAVDILLSRGWRRATRSFR

SEQ ID NO: 27254 - protein, 80 aa, Synthetic construct
FSALPSLEETWQQTCLELERYLQTEPRRISETFGPPPCIEESFRRLDPLLLPVEAAICEKSSAVDILLSRGWRRATRSFR

SEQ ID NO: 27255 - protein, 80 aa, Synthetic construct
FSALPSLEETWQQTCLELERYLQTEPRRISETFGEDPCIEESFRRLDPLLLPVEAAICEKSSAVDILLSRGWRRATRSFR

SEQ ID NO: 27256 - protein, 80 aa, Synthetic construct
FSALPSLEETWQQTCLELERYLQTEPRRISETFGEDLDCFESFRRLDPLLLPVEAAICEKSSAVDILLSRGWRRATRSFR

SEQ ID NO: 27257 - protein, 80 aa, Synthetic construct
FSALPSLEETWQQTCLELERYLQTEPRRISETFGEDLDCFLHFRRLDPLLLPVEAAICEKSSAVDILLSRGWRRATRSFR

SEQ ID NO: 27258 - protein, 80 aa, Synthetic construct
FSALPSLEETWQQTCLELERYLQTEPRRISETFGEDLDCFLHASRLDPLLLPVEAAICEKSSAVDILLSRGWRRATRSFR

SEQ ID NO: 27259 - protein, 80 aa, Synthetic construct
FSALPSLEETWQQTCLELERYLQTEPRRISETFGEDLDCFLHASPPDPLLLPVEAAICEKSSAVDILLSRGWRRATRSFR

SEQ ID NO: 27260 - protein, 80 aa, Synthetic construct
FSALPSLEETWQQTCLELERYLQTEPRRISETFGEDLDCFLHASPPPCLLLPVEAAICEKSSAVDILLSRGWRRATRSFR

SEQ ID NO: 27261 - protein, 80 aa, Synthetic construct
FSALPSLEETWQQTCLELERYLQTEPRRISETFGEDLDCFLHASPPPCIELPVEAAICEKSSAVDILLSRGWRRATRSFR

SEQ ID NO: 27262 - protein, 80 aa, Synthetic construct
FSALPSLEETWQQTCLELERYLQTEPRRISETFGEDLDCFLHASPPPCIEESVEAAICEKSSAVDILLSRGWRRATRSFR

SEQ ID NO: 27263 - protein, 80 aa, Synthetic construct
FSALPSLEETWQQTCLELERYLQTEPRRISETFGEDLDCFLHASPPPCIEESFRAAICEKSSAVDILLSRGWRRATRSFR

SEQ ID NO: 27264 - protein, 80 aa, Synthetic construct
FSALPSLEETWQQTCLELERYLQTEPRRISETFGEDLDCFLHASPPPCIEESFRRLICEKSSAVDILLSRGWRRATRSFR

SEQ ID NO: 27265 - protein, 80 aa, Synthetic construct
FSALPSLEETWQQTCLELERYLQTEPRRISETFGEDLDCFLHASPPPCIEESFRRLDPEKSSAVDILLSRGWRRATRSFR

SEQ ID NO: 27266 - protein, 80 aa, Synthetic construct
HHYESWFRPTHPGAEDGSWWDLHPGTSWMDLPHTQGALTSPGHPGALQAGLGGYVGDHQLCAPPPHPHAHGWRRATRSFR

SEQ ID NO: 27267 - protein, 80 aa, Synthetic construct
FSYESWFRPTHPGAEDGSWWDLHPGTSWMDLPHTQGALTSPGHPGALQAGLGGYVGDHQLCAPPPHPHAHGWRRATRSFR

SEQ ID NO: 27268 - protein, 80 aa, Synthetic construct
FSKLLQPDMSHHYEEDGSWWDLHPGTSWMDLPHTQGALTSPGHPGALQAGLGGYVGDHQLCAPPPHPHAHGWRRATRSFR

SEQ ID NO: 27269 - protein, 80 aa, Synthetic construct
FSKLLQPDMSHHYESWGSWWDLHPGTSWMDLPHTQGALTSPGHPGALQAGLGGYVGDHQLCAPPPHPHAHGWRRATRSFR

SEQ ID NO: 27270 - protein, 80 aa, Synthetic construct
FSKLLQPDMSHHYESWFRPTHPGAEDGSWWDLHTQGALTSPGHPGALQAGLGGYVGDHQLCAPPPHPHAHGWRRATRSFR

SEQ ID NO: 27271 - protein, 80 aa, Synthetic construct
FSKLLQPDMSHHYESWFRPTHPGAEDGSWWDLHPQGALTSPGHPGALQAGLGGYVGDHQLCAPPPHPHAHGWRRATRSFR

SEQ ID NO: 27272 - protein, 80 aa, Synthetic construct
FSKLLQPDMSHHYESWFRPTHPGAEDGSWWDLHPGTALTSPGHPGALQAGLGGYVGDHQLCAPPPHPHAHGWRRATRSFR

SEQ ID NO: 27273 - protein, 80 aa, Synthetic construct
FSKLLQPDMSHHYESWFRPTHPGAEDGSWWDLHPGTSWTSPGHPGALQAGLGGYVGDHQLCAPPPHPHAHGWRRATRSFR

SEQ ID NO: 27274 - protein, 80 aa, Synthetic construct
FSKLLQPDMSHHYESWFRPTHPGAEDGSWWDLHPGTSWMDPGHPGALQAGLGGYVGDHQLCAPPPHPHAHGWRRATRSFR

SEQ ID NO: 27275 - protein, 80 aa, Synthetic construct
FSKLLQPDMSHHYESWFRPTHPGAEDGSWWDLHPGTSWMDLPHTQGALTSPGGYVGDHQLCAPPPHPHAHGWRRATRSFR

SEQ ID NO: 27276 - protein, 80 aa, Synthetic construct
FSKLLQPDMSHHYESWFRPTHPGAEDGSWWDLHPGTSWMDLPHTQGALTSPGHPVGDHQLCAPPPHPHAHGWRRATRSFR

SEQ ID NO: 27277 - protein, 80 aa, Synthetic construct
FSKLLQPDMSHHYESWFRPTHPGAEDGSWWDLHPGTSWMDLPHTQGALTSPGHPGADHQLCAPPPHPHAHGWRRATRSFR

SEQ ID NO: 27278 - protein, 80 aa, Synthetic construct
FSKLLQPDMSHHYESWFRPTHPGAEDGSWWDLHPGTSWMDLPHTQGALTSPGHPGALQQLCAPPPHPHAHGWRRATRSFR

SEQ ID NO: 27279 - protein, 80 aa, Synthetic construct
FSKLLQPDMSHHYESWFRPTHPGAEDGSWWDLHPGTSWMDLPHTQGALTSPGHPGALQAGCAPPPHPHAHGWRRATRSFR

SEQ ID NO: 27280 - protein, 80 aa, Synthetic construct
FSKLLQPDMSHHYESWFRPTHPGAEDGSWWDLHPGTSWMDLPHTQGALTSPGHPGALQAGLGPPPHPHAHGWRRATRSFR

SEQ ID NO: 27281 - protein, 80 aa, Synthetic construct
FSKLLQPDMSHHYESWFRPTHPGAEDGSWWDLHPGTSWMDLPHTQGALTSPGHPGALQAGLGGYPHPHAHGWRRATRSFR

SEQ ID NO: 27282 - protein, 80 aa, Synthetic construct
FSKLLQPDMSHHYESWFRPTHPGAEDGSWWDLHPGTSWMDLPHTQGALTSPGHPGALQAGLGGYVGPHAHGWRRATRSFR

SEQ ID NO: 27283 - protein, 80 aa, Synthetic construct
FSKLLQPDMSHHYESWFRPTHPGAEDGSWWDLHPGTSWMDLPHTQGALTSPGHPGALQAGLGGYVGDHAHGWRRATRSFR

SEQ ID NO: 27284 - protein, 80 aa, Synthetic construct
FSKLLQPDMSHHYESWFRPTHPGAEDGSWWDLHPGTSWMDLPHTQGALTSPGHPGALQAGLGGYVGDHQLGWRRATRSFR

SEQ ID NO: 27285 - protein, 80 aa, Synthetic construct
PSNTSEKEQGPEFWSTADYSLDNEPAQALTWRDSRAWEEQYQWDVEDMKVSGVHWGYEETKTFLAILSESGWRRATRSFR

SEQ ID NO: 27286 - protein, 80 aa, Synthetic construct
PSNTSEKEQGPEFWGLADYSLDNEPAQALTWRDSRAWEEQYQWDVEDMKVSGVHWGYEETKTFLAILSESGWRRATRSFR

SEQ ID NO: 27287 - protein, 80 aa, Synthetic construct
PSNTSEKEQGPEFWGLSLINSGNEPAQALTWRDSRAWEEQYQWDVEDMKVSGVHWGYEETKTFLAILSESGWRRATRSFR

SEQ ID NO: 27288 - protein, 80 aa, Synthetic construct
PSNTSEKEQGPEFWGLSLINSGKRSTADYSLDNEPAWEEQYQWDVEDMKVSGVHWGYEETKTFLAILSESGWRRATRSFR

SEQ ID NO: 27289 - protein, 80 aa, Synthetic construct
PSNTSEKEQGPEFWGLSLINSGKRSTADYSLDNEPAQALTWRDSRAWEEQYQVHWGYEETKTFLAILSESGWRRATRSFR

SEQ ID NO: 27290 - protein, 80 aa, Synthetic construct
PSNTSEKEQGPEFWGLSLINSGKRSTADYSLDNEPAQALTWRDSRAWEEQYQWDWGYEETKTFLAILSESGWRRATRSFR

SEQ ID NO: 27291 - protein, 80 aa, Synthetic construct
PSNTSEKEQGPEFWGLSLINSGKRSTADYSLDNEPAQALTWRDSRAWEEQYQWDVEDMETKTFLAILSESGWRRATRSFR

SEQ ID NO: 27292 - protein, 80 aa, Synthetic construct
PSNTSEKEQGPEFWGLSLINSGKRSTADYSLDNEPAQALTWRDSRAWEEQYQWDVEDMKVSGFLAILSESGWRRATRSFR

SEQ ID NO: 27293 - protein, 80 aa, Synthetic construct
TLGPARLPTDLSDSSSLCLCHEDPWEDEDPAGLPESFLLDGFLNSRVPGIDPWAPGLSLWALEPSREAGAGWRRATRSFR

SEQ ID NO: 27294 - protein, 80 aa, Synthetic construct
QPGPARLPTDLSDSSSLCLCHEDPWEDEDPAGLPESFLLDGFLNSRVPGIDPWAPGLSLWALEPSREAGAGWRRATRSFR

SEQ ID NO: 27295 - protein, 80 aa, Synthetic construct
QPSFARLPTDLSDSSSLCLCHEDPWEDEDPAGLPESFLLDGFLNSRVPGIDPWAPGLSLWALEPSREAGAGWRRATRSFR

SEQ ID NO: 27296 - protein, 80 aa, Synthetic construct
QPSFEEGGTDLSDSSSLCLCHEDPWEDEDPAGLPESFLLDGFLNSRVPGIDPWAPGLSLWALEPSREAGAGWRRATRSFR

SEQ ID NO: 27297 - protein, 80 aa, Synthetic construct
QPSFEEGGDPTLDSSSLCLCHEDPWEDEDPAGLPESFLLDGFLNSRVPGIDPWAPGLSLWALEPSREAGAGWRRATRSFR

SEQ ID NO: 27298 - protein, 80 aa, Synthetic construct
QPSFEEGGDPTLGPARLPLCHEDPWEDEDPAGLPESFLLDGFLNSRVPGIDPWAPGLSLWALEPSREAGAGWRRATRSFR

SEQ ID NO: 27299 - protein, 80 aa, Synthetic construct
QPSFEEGGDPTLGPARLPTDHEDPWEDEDPAGLPESFLLDGFLNSRVPGIDPWAPGLSLWALEPSREAGAGWRRATRSFR

SEQ ID NO: 27300 - protein, 80 aa, Synthetic construct
QPSFEEGGDPTLGPARLPTDLSDPWEDEDPAGLPESFLLDGFLNSRVPGIDPWAPGLSLWALEPSREAGAGWRRATRSFR

SEQ ID NO: 27301 - protein, 80 aa, Synthetic construct
QPSFEEGGDPTLGPARLPTDLSDSWEDEDPAGLPESFLLDGFLNSRVPGIDPWAPGLSLWALEPSREAGAGWRRATRSFR

SEQ ID NO: 27302 - protein, 80 aa, Synthetic construct
QPSFEEGGDPTLGPARLPTDLSDSSSLCDPAGLPESFLLDGFLNSRVPGIDPWAPGLSLWALEPSREAGAGWRRATRSFR

SEQ ID NO: 27303 - protein, 80 aa, Synthetic construct
QPSFEEGGDPTLGPARLPTDLSDSSSLCLCAGLPESFLLDGFLNSRVPGIDPWAPGLSLWALEPSREAGAGWRRATRSFR

SEQ ID NO: 27304 - protein, 80 aa, Synthetic construct
QPSFEEGGDPTLGPARLPTDLSDSSSLCLCHELPESFLLDGFLNSRVPGIDPWAPGLSLWALEPSREAGAGWRRATRSFR

SEQ ID NO: 27305 - protein, 80 aa, Synthetic construct
QPSFEEGGDPTLGPARLPTDLSDSSSLCLCHEDPESFLLDGFLNSRVPGIDPWAPGLSLWALEPSREAGAGWRRATRSFR

SEQ ID NO: 27306 - protein, 80 aa, Synthetic construct
QPSFEEGGDPTLGPARLPTDLSDSSSLCLCHEDPWEFLLDGFLNSRVPGIDPWAPGLSLWALEPSREAGAGWRRATRSFR

SEQ ID NO: 27307 - protein, 80 aa, Synthetic construct
QPSFEEGGDPTLGPARLPTDLSDSSSLCLCHEDPWEDELDGFLNSRVPGIDPWAPGLSLWALEPSREAGAGWRRATRSFR

SEQ ID NO: 27308 - protein, 80 aa, Synthetic construct
QPSFEEGGDPTLGPARLPTDLSDSSSLCLCHEDPWEDEDPGFLNSRVPGIDPWAPGLSLWALEPSREAGAGWRRATRSFR

SEQ ID NO: 27309 - protein, 80 aa, Synthetic construct
QPSFEEGGDPTLGPARLPTDLSDSSSLCLCHEDPWEDEDPAGLPESFLGIDPWAPGLSLWALEPSREAGAGWRRATRSFR

SEQ ID NO: 27310 - protein, 80 aa, Synthetic construct
QPSFEEGGDPTLGPARLPTDLSDSSSLCLCHEDPWEDEDPAGLPESFLLDDPWAPGLSLWALEPSREAGAGWRRATRSFR

SEQ ID NO: 27311 - protein, 80 aa, Synthetic construct
QPSFEEGGDPTLGPARLPTDLSDSSSLCLCHEDPWEDEDPAGLPESFLLDGFLNPGLSLWALEPSREAGAGWRRATRSFR

SEQ ID NO: 27312 - protein, 80 aa, Synthetic construct
QPSFEEGGDPTLGPARLPTDLSDSSSLCLCHEDPWEDEDPAGLPESFLLDGFLNSRLSLWALEPSREAGAGWRRATRSFR

SEQ ID NO: 27313 - protein, 80 aa, Synthetic construct
QPSFEEGGDPTLGPARLPTDLSDSSSLCLCHEDPWEDEDPAGLPESFLLDGFLNSRVPLWALEPSREAGAGWRRATRSFR

SEQ ID NO: 27314 - protein, 80 aa, Synthetic construct
QPSFEEGGDPTLGPARLPTDLSDSSSLCLCHEDPWEDEDPAGLPESFLLDGFLNSRVPGIDPWASREAGAGWRRATRSFR

SEQ ID NO: 27315 - protein, 80 aa, Synthetic construct
QPSFEEGGDPTLGPARLPTDLSDSSSLCLCHEDPWEDEDPAGLPESFLLDGFLNSRVPGIDPWAPGEAGAGWRRATRSFR

SEQ ID NO: 27316 - protein, 80 aa, Synthetic construct
QPSFEEGGDPTLGPARLPTDLSDSSSLCLCHEDPWEDEDPAGLPESFLLDGFLNSRVPGIDPWAPGLSGAGWRRATRSFR

SEQ ID NO: 27317 - protein, 80 aa, Synthetic construct
QPSFEEGGDPTLGPARLPTDLSDSSSLCLCHEDPWEDEDPAGLPESFLLDGFLNSRVPGIDPWAPGLSLWGWRRATRSFR

SEQ ID NO: 27318 - protein, 80 aa, Synthetic construct
APHYDSTFANISKDDSDLIYSTYGEDSDLPSDFSIHEFLATCQDYPYVMADSLLDVLTKGGHSRTLQEMEGWRRATRSFR

SEQ ID NO: 27319 - protein, 80 aa, Synthetic construct
YLHYDSTFANISKDDSDLIYSTYGEDSDLPSDFSIHEFLATCQDYPYVMADSLLDVLTKGGHSRTLQEMEGWRRATRSFR

SEQ ID NO: 27320 - protein, 80 aa, Synthetic construct
YLNYDSTFANISKDDSDLIYSTYGEDSDLPSDFSIHEFLATCQDYPYVMADSLLDVLTKGGHSRTLQEMEGWRRATRSFR

SEQ ID NO: 27321 - protein, 80 aa, Synthetic construct
YLNYGPTFANISKDDSDLIYSTYGEDSDLPSDFSIHEFLATCQDYPYVMADSLLDVLTKGGHSRTLQEMEGWRRATRSFR

SEQ ID NO: 27322 - protein, 80 aa, Synthetic construct
YLNYGPYSANISKDDSDLIYSTYGEDSDLPSDFSIHEFLATCQDYPYVMADSLLDVLTKGGHSRTLQEMEGWRRATRSFR

SEQ ID NO: 27323 - protein, 80 aa, Synthetic construct
YLNYGPYSSYISKDDSDLIYSTYGEDSDLPSDFSIHEFLATCQDYPYVMADSLLDVLTKGGHSRTLQEMEGWRRATRSFR

SEQ ID NO: 27324 - protein, 80 aa, Synthetic construct
YLNYGPYSSYAPKDDSDLIYSTYGEDSDLPSDFSIHEFLATCQDYPYVMADSLLDVLTKGGHSRTLQEMEGWRRATRSFR

SEQ ID NO: 27325 - protein, 80 aa, Synthetic construct
YLNYGPYSSYAPHYDSDLIYSTYGEDSDLPSDFSIHEFLATCQDYPYVMADSLLDVLTKGGHSRTLQEMEGWRRATRSFR

SEQ ID NO: 27326 - protein, 80 aa, Synthetic construct
YLNYGPYSSYAPHYDSTFIYSTYGEDSDLPSDFSIHEFLATCQDYPYVMADSLLDVLTKGGHSRTLQEMEGWRRATRSFR

SEQ ID NO: 27327 - protein, 80 aa, Synthetic construct
YLNYGPYSSYAPHYDSTFANSTYGEDSDLPSDFSIHEFLATCQDYPYVMADSLLDVLTKGGHSRTLQEMEGWRRATRSFR

SEQ ID NO: 27328 - protein, 80 aa, Synthetic construct
YLNYGPYSSYAPHYDSTFANISYGEDSDLPSDFSIHEFLATCQDYPYVMADSLLDVLTKGGHSRTLQEMEGWRRATRSFR

SEQ ID NO: 27329 - protein, 80 aa, Synthetic construct
YLNYGPYSSYAPHYDSTFANISKDEDSDLPSDFSIHEFLATCQDYPYVMADSLLDVLTKGGHSRTLQEMEGWRRATRSFR

SEQ ID NO: 27330 - protein, 80 aa, Synthetic construct
YLNYGPYSSYAPHYDSTFANISKDDSSDLPSDFSIHEFLATCQDYPYVMADSLLDVLTKGGHSRTLQEMEGWRRATRSFR

SEQ ID NO: 27331 - protein, 80 aa, Synthetic construct
YLNYGPYSSYAPHYDSTFANISKDDSDLLPSDFSIHEFLATCQDYPYVMADSLLDVLTKGGHSRTLQEMEGWRRATRSFR

SEQ ID NO: 27332 - protein, 80 aa, Synthetic construct
YLNYGPYSSYAPHYDSTFANISKDDSDLIYSDFSIHEFLATCQDYPYVMADSLLDVLTKGGHSRTLQEMEGWRRATRSFR

SEQ ID NO: 27333 - protein, 80 aa, Synthetic construct
YLNYGPYSSYAPHYDSTFANISKDDSDLIYSTYGEDEFLATCQDYPYVMADSLLDVLTKGGHSRTLQEMEGWRRATRSFR

SEQ ID NO: 27334 - protein, 80 aa, Synthetic construct
YLNYGPYSSYAPHYDSTFANISKDDSDLIYSTYGEDSDLATCQDYPYVMADSLLDVLTKGGHSRTLQEMEGWRRATRSFR

SEQ ID NO: 27335 - protein, 80 aa, Synthetic construct
YLNYGPYSSYAPHYDSTFANISKDDSDLIYSTYGEDSDLPTCQDYPYVMADSLLDVLTKGGHSRTLQEMEGWRRATRSFR

SEQ ID NO: 27336 - protein, 80 aa, Synthetic construct
YLNYGPYSSYAPHYDSTFANISKDDSDLIYSTYGEDSDLPSDQDYPYVMADSLLDVLTKGGHSRTLQEMEGWRRATRSFR

SEQ ID NO: 27337 - protein, 80 aa, Synthetic construct
YLNYGPYSSYAPHYDSTFANISKDDSDLIYSTYGEDSDLPSDFSYPYVMADSLLDVLTKGGHSRTLQEMEGWRRATRSFR

SEQ ID NO: 27338 - protein, 80 aa, Synthetic construct
YLNYGPYSSYAPHYDSTFANISKDDSDLIYSTYGEDSDLPSDFSIHEFMADSLLDVLTKGGHSRTLQEMEGWRRATRSFR

SEQ ID NO: 27339 - protein, 80 aa, Synthetic construct
YLNYGPYSSYAPHYDSTFANISKDDSDLIYSTYGEDSDLPSDFSIHEFLADSLLDVLTKGGHSRTLQEMEGWRRATRSFR

SEQ ID NO: 27340 - protein, 80 aa, Synthetic construct
YLNYGPYSSYAPHYDSTFANISKDDSDLIYSTYGEDSDLPSDFSIHEFLATCQDYPYVMADSLLDVLTKGGWRRATRSFR

SEQ ID NO: 27341 - protein, 80 aa, Synthetic construct
GDRFRSIIDDAWWFGTVESQQPFQPEYPDSSFQCYSVHWDNNEREKMSPWDMEPIPEGTAFPDEVGAGVPGWRRATRSFR

SEQ ID NO: 27342 - protein, 80 aa, Synthetic construct
NERFRSIIDDAWWFGTVESQQPFQPEYPDSSFQCYSVHWDNNEREKMSPWDMEPIPEGTAFPDEVGAGVPGWRRATRSFR

SEQ ID NO: 27343 - protein, 80 aa, Synthetic construct
NEAKRSIIDDAWWFGTVESQQPFQPEYPDSSFQCYSVHWDNNEREKMSPWDMEPIPEGTAFPDEVGAGVPGWRRATRSFR

SEQ ID NO: 27344 - protein, 80 aa, Synthetic construct
NEAKERIIDDAWWFGTVESQQPFQPEYPDSSFQCYSVHWDNNEREKMSPWDMEPIPEGTAFPDEVGAGVPGWRRATRSFR

SEQ ID NO: 27345 - protein, 80 aa, Synthetic construct
NEAKERNWDDAWWFGTVESQQPFQPEYPDSSFQCYSVHWDNNEREKMSPWDMEPIPEGTAFPDEVGAGVPGWRRATRSFR

SEQ ID NO: 27346 - protein, 80 aa, Synthetic construct
NEAKERNWQIGDWFGTVESQQPFQPEYPDSSFQCYSVHWDNNEREKMSPWDMEPIPEGTAFPDEVGAGVPGWRRATRSFR

SEQ ID NO: 27347 - protein, 80 aa, Synthetic construct
NEAKERNWQIGDRFRSIIDDAWFQPEYPDSSFQCYSVHWDNNEREKMSPWDMEPIPEGTAFPDEVGAGVPGWRRATRSFR

SEQ ID NO: 27348 - protein, 80 aa, Synthetic construct
NEAKERNWQIGDRFRSIIDDAWWFPEYPDSSFQCYSVHWDNNEREKMSPWDMEPIPEGTAFPDEVGAGVPGWRRATRSFR

SEQ ID NO: 27349 - protein, 80 aa, Synthetic construct
NEAKERNWQIGDRFRSIIDDAWWFGTYPDSSFQCYSVHWDNNEREKMSPWDMEPIPEGTAFPDEVGAGVPGWRRATRSFR

SEQ ID NO: 27350 - protein, 80 aa, Synthetic construct
NEAKERNWQIGDRFRSIIDDAWWFGTVEDSSFQCYSVHWDNNEREKMSPWDMEPIPEGTAFPDEVGAGVPGWRRATRSFR

SEQ ID NO: 27351 - protein, 80 aa, Synthetic construct
NEAKERNWQIGDRFRSIIDDAWWFGTVESQQPQCYSVHWDNNEREKMSPWDMEPIPEGTAFPDEVGAGVPGWRRATRSFR

SEQ ID NO: 27352 - protein, 80 aa, Synthetic construct
NEAKERNWQIGDRFRSIIDDAWWFGTVESQQPFQYSVHWDNNEREKMSPWDMEPIPEGTAFPDEVGAGVPGWRRATRSFR

SEQ ID NO: 27353 - protein, 80 aa, Synthetic construct
NEAKERNWQIGDRFRSIIDDAWWFGTVESQQPFQPEVHWDNNEREKMSPWDMEPIPEGTAFPDEVGAGVPGWRRATRSFR

SEQ ID NO: 27354 - protein, 80 aa, Synthetic construct
NEAKERNWQIGDRFRSIIDDAWWFGTVESQQPFQPEYPWDNNEREKMSPWDMEPIPEGTAFPDEVGAGVPGWRRATRSFR

SEQ ID NO: 27355 - protein, 80 aa, Synthetic construct
NEAKERNWQIGDRFRSIIDDAWWFGTVESQQPFQPEYPDSNNEREKMSPWDMEPIPEGTAFPDEVGAGVPGWRRATRSFR

SEQ ID NO: 27356 - protein, 80 aa, Synthetic construct
NEAKERNWQIGDRFRSIIDDAWWFGTVESQQPFQPEYPDSSFEREKMSPWDMEPIPEGTAFPDEVGAGVPGWRRATRSFR

SEQ ID NO: 27357 - protein, 80 aa, Synthetic construct
NEAKERNWQIGDRFRSIIDDAWWFGTVESQQPFQPEYPDSSFQCEKMSPWDMEPIPEGTAFPDEVGAGVPGWRRATRSFR

SEQ ID NO: 27358 - protein, 80 aa, Synthetic construct
NEAKERNWQIGDRFRSIIDDAWWFGTVESQQPFQPEYPDSSFQCYSMSPWDMEPIPEGTAFPDEVGAGVPGWRRATRSFR

SEQ ID NO: 27359 - protein, 80 aa, Synthetic construct
NEAKERNWQIGDRFRSIIDDAWWFGTVESQQPFQPEYPDSSFQCYSVHPWDMEPIPEGTAFPDEVGAGVPGWRRATRSFR

SEQ ID NO: 27360 - protein, 80 aa, Synthetic construct
NEAKERNWQIGDRFRSIIDDAWWFGTVESQQPFQPEYPDSSFQCYSVHWDDMEPIPEGTAFPDEVGAGVPGWRRATRSFR

SEQ ID NO: 27361 - protein, 80 aa, Synthetic construct
NEAKERNWQIGDRFRSIIDDAWWFGTVESQQPFQPEYPDSSFQCYSVHWDNNEPIPEGTAFPDEVGAGVPGWRRATRSFR

SEQ ID NO: 27362 - protein, 80 aa, Synthetic construct
NEAKERNWQIGDRFRSIIDDAWWFGTVESQQPFQPEYPDSSFQCYSVHWDNNERIPEGTAFPDEVGAGVPGWRRATRSFR

SEQ ID NO: 27363 - protein, 80 aa, Synthetic construct
NEAKERNWQIGDRFRSIIDDAWWFGTVESQQPFQPEYPDSSFQCYSVHWDNNEREKEGTAFPDEVGAGVPGWRRATRSFR

SEQ ID NO: 27364 - protein, 80 aa, Synthetic construct
NEAKERNWQIGDRFRSIIDDAWWFGTVESQQPFQPEYPDSSFQCYSVHWDNNEREKMSTAFPDEVGAGVPGWRRATRSFR

SEQ ID NO: 27365 - protein, 80 aa, Synthetic construct
NEAKERNWQIGDRFRSIIDDAWWFGTVESQQPFQPEYPDSSFQCYSVHWDNNEREKMSPWFPDEVGAGVPGWRRATRSFR

SEQ ID NO: 27366 - protein, 80 aa, Synthetic construct
NEAKERNWQIGDRFRSIIDDAWWFGTVESQQPFQPEYPDSSFQCYSVHWDNNEREKMSPWDMDEVGAGVPGWRRATRSFR

SEQ ID NO: 27367 - protein, 80 aa, Synthetic construct
NEAKERNWQIGDRFRSIIDDAWWFGTVESQQPFQPEYPDSSFQCYSVHWDNNEREKMSPWDMEPVGAGVPGWRRATRSFR

SEQ ID NO: 27368 - protein, 80 aa, Synthetic construct
NEAKERNWQIGDRFRSIIDDAWWFGTVESQQPFQPEYPDSSFQCYSVHWDNNEREKMSPWDMEPIPAGVPGWRRATRSFR

SEQ ID NO: 27369 - protein, 80 aa, Synthetic construct
NEAKERNWQIGDRFRSIIDDAWWFGTVESQQPFQPEYPDSSFQCYSVHWDNNEREKMSPWDMEPIPEGVPGWRRATRSFR

SEQ ID NO: 27370 - protein, 80 aa, Synthetic construct
NEAKERNWQIGDRFRSIIDDAWWFGTVESQQPFQPEYPDSSFQCYSVHWDNNEREKMSPWDMEPIPEGTAGWRRATRSFR

SEQ ID NO: 27371 - protein, 80 aa, Synthetic construct
GDWFGTVESQQPFQPEYPDSSFQCYSVHWDNNEREKMSPWDMEPIPEGTAFPDEVGAGVPVSQEELTALLGWRRATRSFR

SEQ ID NO: 27372 - protein, 80 aa, Synthetic construct
GDRFRSIIDDAWFQPEYPDSSFQCYSVHWDNNEREKMSPWDMEPIPEGTAFPDEVGAGVPVSQEELTALLGWRRATRSFR

SEQ ID NO: 27373 - protein, 80 aa, Synthetic construct
GDRFRSIIDDAWWFPEYPDSSFQCYSVHWDNNEREKMSPWDMEPIPEGTAFPDEVGAGVPVSQEELTALLGWRRATRSFR

SEQ ID NO: 27374 - protein, 80 aa, Synthetic construct
GDRFRSIIDDAWWFGTYPDSSFQCYSVHWDNNEREKMSPWDMEPIPEGTAFPDEVGAGVPVSQEELTALLGWRRATRSFR

SEQ ID NO: 27375 - protein, 80 aa, Synthetic construct
GDRFRSIIDDAWWFGTVEDSSFQCYSVHWDNNEREKMSPWDMEPIPEGTAFPDEVGAGVPVSQEELTALLGWRRATRSFR

SEQ ID NO: 27376 - protein, 80 aa, Synthetic construct
GDRFRSIIDDAWWFGTVESQSFQCYSVHWDNNEREKMSPWDMEPIPEGTAFPDEVGAGVPVSQEELTALLGWRRATRSFR

SEQ ID NO: 27377 - protein, 80 aa, Synthetic construct
GDRFRSIIDDAWWFGTVESQQPQCYSVHWDNNEREKMSPWDMEPIPEGTAFPDEVGAGVPVSQEELTALLGWRRATRSFR

SEQ ID NO: 27378 - protein, 80 aa, Synthetic construct
GDRFRSIIDDAWWFGTVESQQPFQYSVHWDNNEREKMSPWDMEPIPEGTAFPDEVGAGVPVSQEELTALLGWRRATRSFR

SEQ ID NO: 27379 - protein, 80 aa, Synthetic construct
GDRFRSIIDDAWWFGTVESQQPFQPEVHWDNNEREKMSPWDMEPIPEGTAFPDEVGAGVPVSQEELTALLGWRRATRSFR

SEQ ID NO: 27380 - protein, 80 aa, Synthetic construct
GDRFRSIIDDAWWFGTVESQQPFQPEYPWDNNEREKMSPWDMEPIPEGTAFPDEVGAGVPVSQEELTALLGWRRATRSFR

SEQ ID NO: 27381 - protein, 80 aa, Synthetic construct
GDRFRSIIDDAWWFGTVESQQPFQPEYPDSNNEREKMSPWDMEPIPEGTAFPDEVGAGVPVSQEELTALLGWRRATRSFR

SEQ ID NO: 27382 - protein, 80 aa, Synthetic construct
GDRFRSIIDDAWWFGTVESQQPFQPEYPDSSFEREKMSPWDMEPIPEGTAFPDEVGAGVPVSQEELTALLGWRRATRSFR

SEQ ID NO: 27383 - protein, 80 aa, Synthetic construct
GDRFRSIIDDAWWFGTVESQQPFQPEYPDSSFQCEKMSPWDMEPIPEGTAFPDEVGAGVPVSQEELTALLGWRRATRSFR

SEQ ID NO: 27384 - protein, 80 aa, Synthetic construct
GDRFRSIIDDAWWFGTVESQQPFQPEYPDSSFQCYSMSPWDMEPIPEGTAFPDEVGAGVPVSQEELTALLGWRRATRSFR

SEQ ID NO: 27385 - protein, 80 aa, Synthetic construct
GDRFRSIIDDAWWFGTVESQQPFQPEYPDSSFQCYSVHPWDMEPIPEGTAFPDEVGAGVPVSQEELTALLGWRRATRSFR

SEQ ID NO: 27386 - protein, 80 aa, Synthetic construct
GDRFRSIIDDAWWFGTVESQQPFQPEYPDSSFQCYSVHWDDMEPIPEGTAFPDEVGAGVPVSQEELTALLGWRRATRSFR

SEQ ID NO: 27387 - protein, 80 aa, Synthetic construct
GDRFRSIIDDAWWFGTVESQQPFQPEYPDSSFQCYSVHWDNNEPIPEGTAFPDEVGAGVPVSQEELTALLGWRRATRSFR

SEQ ID NO: 27388 - protein, 80 aa, Synthetic construct
GDRFRSIIDDAWWFGTVESQQPFQPEYPDSSFQCYSVHWDNNERIPEGTAFPDEVGAGVPVSQEELTALLGWRRATRSFR

SEQ ID NO: 27389 - protein, 80 aa, Synthetic construct
GDRFRSIIDDAWWFGTVESQQPFQPEYPDSSFQCYSVHWDNNEREKEGTAFPDEVGAGVPVSQEELTALLGWRRATRSFR

SEQ ID NO: 27390 - protein, 80 aa, Synthetic construct
GDRFRSIIDDAWWFGTVESQQPFQPEYPDSSFQCYSVHWDNNEREKMSTAFPDEVGAGVPVSQEELTALLGWRRATRSFR

SEQ ID NO: 27391 - protein, 80 aa, Synthetic construct
GDRFRSIIDDAWWFGTVESQQPFQPEYPDSSFQCYSVHWDNNEREKMSPWFPDEVGAGVPVSQEELTALLGWRRATRSFR

SEQ ID NO: 27392 - protein, 80 aa, Synthetic construct
GDRFRSIIDDAWWFGTVESQQPFQPEYPDSSFQCYSVHWDNNEREKMSPWDMDEVGAGVPVSQEELTALLGWRRATRSFR

SEQ ID NO: 27393 - protein, 80 aa, Synthetic construct
GDRFRSIIDDAWWFGTVESQQPFQPEYPDSSFQCYSVHWDNNEREKMSPWDMEPVGAGVPVSQEELTALLGWRRATRSFR

SEQ ID NO: 27394 - protein, 80 aa, Synthetic construct
GDRFRSIIDDAWWFGTVESQQPFQPEYPDSSFQCYSVHWDNNEREKMSPWDMEPIPAGVPVSQEELTALLGWRRATRSFR

SEQ ID NO: 27395 - protein, 80 aa, Synthetic construct
GDRFRSIIDDAWWFGTVESQQPFQPEYPDSSFQCYSVHWDNNEREKMSPWDMEPIPEGVPVSQEELTALLGWRRATRSFR

SEQ ID NO: 27396 - protein, 80 aa, Synthetic construct
GDRFRSIIDDAWWFGTVESQQPFQPEYPDSSFQCYSVHWDNNEREKMSPWDMEPIPEGTAVSQEELTALLGWRRATRSFR

SEQ ID NO: 27397 - protein, 80 aa, Synthetic construct
GDRFRSIIDDAWWFGTVESQQPFQPEYPDSSFQCYSVHWDNNEREKMSPWDMEPIPEGTAFPQEELTALLGWRRATRSFR

SEQ ID NO: 27398 - protein, 80 aa, Synthetic construct
GDRFRSIIDDAWWFGTVESQQPFQPEYPDSSFQCYSVHWDNNEREKMSPWDMEPIPEGTAFPDEELTALLGWRRATRSFR

SEQ ID NO: 27399 - protein, 80 aa, Synthetic construct
GDRFRSIIDDAWWFGTVESQQPFQPEYPDSSFQCYSVHWDNNEREKMSPWDMEPIPEGTAFPDEVGTALLGWRRATRSFR

SEQ ID NO: 27400 - protein, 80 aa, Synthetic construct
GDRFRSIIDDAWWFGTVESQQPFQPEYPDSSFQCYSVHWDNNEREKMSPWDMEPIPEGTAFPDEVGAGLLGWRRATRSFR

SEQ ID NO: 27401 - protein, 80 aa, Synthetic construct
AWFQPEYPDSSFQCYSVHWDNNEREKMSPWDMEPIPEGTAFPDEVGAGVPVSQEELTALLYKPQEGEWGAGWRRATRSFR

SEQ ID NO: 27402 - protein, 80 aa, Synthetic construct
AWWFGTVESQQPQCYSVHWDNNEREKMSPWDMEPIPEGTAFPDEVGAGVPVSQEELTALLYKPQEGEWGAGWRRATRSFR

SEQ ID NO: 27403 - protein, 80 aa, Synthetic construct
AWWFGTVESQQPFQPEVHWDNNEREKMSPWDMEPIPEGTAFPDEVGAGVPVSQEELTALLYKPQEGEWGAGWRRATRSFR

SEQ ID NO: 27404 - protein, 80 aa, Synthetic construct
AWWFGTVESQQPFQPEYPWDNNEREKMSPWDMEPIPEGTAFPDEVGAGVPVSQEELTALLYKPQEGEWGAGWRRATRSFR

SEQ ID NO: 27405 - protein, 80 aa, Synthetic construct
AWWFGTVESQQPFQPEYPDSSFEREKMSPWDMEPIPEGTAFPDEVGAGVPVSQEELTALLYKPQEGEWGAGWRRATRSFR

SEQ ID NO: 27406 - protein, 80 aa, Synthetic construct
AWWFGTVESQQPFQPEYPDSSFQCEKMSPWDMEPIPEGTAFPDEVGAGVPVSQEELTALLYKPQEGEWGAGWRRATRSFR

SEQ ID NO: 27407 - protein, 80 aa, Synthetic construct
AWWFGTVESQQPFQPEYPDSSFQCYSVHWDNNERIPEGTAFPDEVGAGVPVSQEELTALLYKPQEGEWGAGWRRATRSFR

SEQ ID NO: 27408 - protein, 80 aa, Synthetic construct
AWWFGTVESQQPFQPEYPDSSFQCYSVHWDNNEREKEGTAFPDEVGAGVPVSQEELTALLYKPQEGEWGAGWRRATRSFR

SEQ ID NO: 27409 - protein, 80 aa, Synthetic construct
AWWFGTVESQQPFQPEYPDSSFQCYSVHWDNNEREKMSTAFPDEVGAGVPVSQEELTALLYKPQEGEWGAGWRRATRSFR

SEQ ID NO: 27410 - protein, 80 aa, Synthetic construct
AWWFGTVESQQPFQPEYPDSSFQCYSVHWDNNEREKMSPWFPDEVGAGVPVSQEELTALLYKPQEGEWGAGWRRATRSFR

SEQ ID NO: 27411 - protein, 80 aa, Synthetic construct
AWWFGTVESQQPFQPEYPDSSFQCYSVHWDNNEREKMSPWDMEPIPEGTAFPDEVGAGVPYKPQEGEWGAGWRRATRSFR

SEQ ID NO: 27412 - protein, 80 aa, Synthetic construct
AWWFGTVESQQPFQPEYPDSSFQCYSVHWDNNEREKMSPWDMEPIPEGTAFPDEVGAGVPVSQEELTAGAGWRRATRSFR

SEQ ID NO: 27413 - protein, 80 aa, Synthetic construct
AWWFGTVESQQPFQPEYPDSSFQCYSVHWDNNEREKMSPWDMEPIPEGTAFPDEVGAGVPVSQEELTALLGWRRATRSFR

SEQ ID NO: 27414 - protein, 80 aa, Synthetic construct
RPKKYIVSSGSEPPELGYVDIRTLADSVCRYDLNDMDAAWLELTNEEFKEMGMPELDEYTMERVLEEFEQGWRRATRSFR

SEQ ID NO: 27415 - protein, 80 aa, Synthetic construct
VSKKYIVSSGSEPPELGYVDIRTLADSVCRYDLNDMDAAWLELTNEEFKEMGMPELDEYTMERVLEEFEQGWRRATRSFR

SEQ ID NO: 27416 - protein, 80 aa, Synthetic construct
VSEEYIVSSGSEPPELGYVDIRTLADSVCRYDLNDMDAAWLELTNEEFKEMGMPELDEYTMERVLEEFEQGWRRATRSFR

SEQ ID NO: 27417 - protein, 80 aa, Synthetic construct
VSEEKSVSSGSEPPELGYVDIRTLADSVCRYDLNDMDAAWLELTNEEFKEMGMPELDEYTMERVLEEFEQGWRRATRSFR

SEQ ID NO: 27418 - protein, 80 aa, Synthetic construct
VSEEKSLMSGSEPPELGYVDIRTLADSVCRYDLNDMDAAWLELTNEEFKEMGMPELDEYTMERVLEEFEQGWRRATRSFR

SEQ ID NO: 27419 - protein, 80 aa, Synthetic construct
VSEEKSLMFISEPPELGYVDIRTLADSVCRYDLNDMDAAWLELTNEEFKEMGMPELDEYTMERVLEEFEQGWRRATRSFR

SEQ ID NO: 27420 - protein, 80 aa, Synthetic construct
VSEEKSLMFIRPPPELGYVDIRTLADSVCRYDLNDMDAAWLELTNEEFKEMGMPELDEYTMERVLEEFEQGWRRATRSFR

SEQ ID NO: 27421 - protein, 80 aa, Synthetic construct
VSEEKSLMFIRPKKYIVSSGSETLADSVCRYDLNDMDAAWLELTNEEFKEMGMPELDEYTMERVLEEFEQGWRRATRSFR

SEQ ID NO: 27422 - protein, 80 aa, Synthetic construct
VSEEKSLMFIRPKKYIVSSGSEPPELSVCRYDLNDMDAAWLELTNEEFKEMGMPELDEYTMERVLEEFEQGWRRATRSFR

SEQ ID NO: 27423 - protein, 80 aa, Synthetic construct
VSEEKSLMFIRPKKYIVSSGSEPPELGYVDIRTLADDAAWLELTNEEFKEMGMPELDEYTMERVLEEFEQGWRRATRSFR

SEQ ID NO: 27424 - protein, 80 aa, Synthetic construct
VSEEKSLMFIRPKKYIVSSGSEPPELGYVDIRTLADSVCRYDLNDMDAAWLELTNEDEYTMERVLEEFEQGWRRATRSFR

SEQ ID NO: 27425 - protein, 80 aa, Synthetic construct
SEPPELGYVDIRTLADSVCRYDLNDMDAAWLELTNEEFKEMGMPELDEYTMERVLEEFEQRCYDNMNHAIGWRRATRSFR

SEQ ID NO: 27426 - protein, 80 aa, Synthetic construct
RPPPELGYVDIRTLADSVCRYDLNDMDAAWLELTNEEFKEMGMPELDEYTMERVLEEFEQRCYDNMNHAIGWRRATRSFR

SEQ ID NO: 27427 - protein, 80 aa, Synthetic construct
RPKKELGYVDIRTLADSVCRYDLNDMDAAWLELTNEEFKEMGMPELDEYTMERVLEEFEQRCYDNMNHAIGWRRATRSFR

SEQ ID NO: 27428 - protein, 80 aa, Synthetic construct
RPKKYIVSSGSETLADSVCRYDLNDMDAAWLELTNEEFKEMGMPELDEYTMERVLEEFEQRCYDNMNHAIGWRRATRSFR

SEQ ID NO: 27429 - protein, 80 aa, Synthetic construct
RPKKYIVSSGSEPPADSVCRYDLNDMDAAWLELTNEEFKEMGMPELDEYTMERVLEEFEQRCYDNMNHAIGWRRATRSFR

SEQ ID NO: 27430 - protein, 80 aa, Synthetic construct
RPKKYIVSSGSEPPELSVCRYDLNDMDAAWLELTNEEFKEMGMPELDEYTMERVLEEFEQRCYDNMNHAIGWRRATRSFR

SEQ ID NO: 27431 - protein, 80 aa, Synthetic construct
RPKKYIVSSGSEPPELGYCRYDLNDMDAAWLELTNEEFKEMGMPELDEYTMERVLEEFEQRCYDNMNHAIGWRRATRSFR

SEQ ID NO: 27432 - protein, 80 aa, Synthetic construct
RPKKYIVSSGSEPPELGYVDYDLNDMDAAWLELTNEEFKEMGMPELDEYTMERVLEEFEQRCYDNMNHAIGWRRATRSFR

SEQ ID NO: 27433 - protein, 80 aa, Synthetic construct
RPKKYIVSSGSEPPELGYVDIRLNDMDAAWLELTNEEFKEMGMPELDEYTMERVLEEFEQRCYDNMNHAIGWRRATRSFR

SEQ ID NO: 27434 - protein, 80 aa, Synthetic construct
RPKKYIVSSGSEPPELGYVDIRTLDMDAAWLELTNEEFKEMGMPELDEYTMERVLEEFEQRCYDNMNHAIGWRRATRSFR

SEQ ID NO: 27435 - protein, 80 aa, Synthetic construct
RPKKYIVSSGSEPPELGYVDIRTLADDAAWLELTNEEFKEMGMPELDEYTMERVLEEFEQRCYDNMNHAIGWRRATRSFR

SEQ ID NO: 27436 - protein, 80 aa, Synthetic construct
RPKKYIVSSGSEPPELGYVDIRTLADSVCRYDLTNEEFKEMGMPELDEYTMERVLEEFEQRCYDNMNHAIGWRRATRSFR

SEQ ID NO: 27437 - protein, 80 aa, Synthetic construct
RPKKYIVSSGSEPPELGYVDIRTLADSVCRYDLNNEEFKEMGMPELDEYTMERVLEEFEQRCYDNMNHAIGWRRATRSFR

SEQ ID NO: 27438 - protein, 80 aa, Synthetic construct
RPKKYIVSSGSEPPELGYVDIRTLADSVCRYDLNDMEFKEMGMPELDEYTMERVLEEFEQRCYDNMNHAIGWRRATRSFR

SEQ ID NO: 27439 - protein, 80 aa, Synthetic construct
RPKKYIVSSGSEPPELGYVDIRTLADSVCRYDLNDMDAKEMGMPELDEYTMERVLEEFEQRCYDNMNHAIGWRRATRSFR

SEQ ID NO: 27440 - protein, 80 aa, Synthetic construct
RPKKYIVSSGSEPPELGYVDIRTLADSVCRYDLNDMDAAWLELTNEDEYTMERVLEEFEQRCYDNMNHAIGWRRATRSFR

SEQ ID NO: 27441 - protein, 80 aa, Synthetic construct
RPKKYIVSSGSEPPELGYVDIRTLADSVCRYDLNDMDAAWLELTNEEFKEMGMPLEEFEQRCYDNMNHAIGWRRATRSFR

SEQ ID NO: 27442 - protein, 80 aa, Synthetic construct
RPKKYIVSSGSEPPELGYVDIRTLADSVCRYDLNDMDAAWLELTNEEFKEMGMPELEFEQRCYDNMNHAIGWRRATRSFR

SEQ ID NO: 27443 - protein, 80 aa, Synthetic construct
RPKKYIVSSGSEPPELGYVDIRTLADSVCRYDLNDMDAAWLELTNEEFKEMGMPELDEEQRCYDNMNHAIGWRRATRSFR

SEQ ID NO: 27444 - protein, 80 aa, Synthetic construct
RPKKYIVSSGSEPPELGYVDIRTLADSVCRYDLNDMDAAWLELTNEEFKEMGMPELDEYTRCYDNMNHAIGWRRATRSFR

SEQ ID NO: 27445 - protein, 80 aa, Synthetic construct
RPKKYIVSSGSEPPELGYVDIRTLADSVCRYDLNDMDAAWLELTNEEFKEMGMPELDEYTMEYDNMNHAIGWRRATRSFR

SEQ ID NO: 27446 - protein, 80 aa, Synthetic construct
RPKKYIVSSGSEPPELGYVDIRTLADSVCRYDLNDMDAAWLELTNEEFKEMGMPELDEYTMERVNMNHAIGWRRATRSFR

SEQ ID NO: 27447 - protein, 80 aa, Synthetic construct
RPKKYIVSSGSEPPELGYVDIRTLADSVCRYDLNDMDAAWLELTNEEFKEMGMPELDEYTMERVLENHAIGWRRATRSFR

SEQ ID NO: 27448 - protein, 80 aa, Synthetic construct
LELTNEEFKEMGMPELDEYTMERVLEEFEQRCYDNMNHAIETEEGLGIEYDEDVVCDVCQSPDGEDGNEMGWRRATRSFR

SEQ ID NO: 27449 - protein, 80 aa, Synthetic construct
YDLTNEEFKEMGMPELDEYTMERVLEEFEQRCYDNMNHAIETEEGLGIEYDEDVVCDVCQSPDGEDGNEMGWRRATRSFR

SEQ ID NO: 27450 - protein, 80 aa, Synthetic construct
YDLNNEEFKEMGMPELDEYTMERVLEEFEQRCYDNMNHAIETEEGLGIEYDEDVVCDVCQSPDGEDGNEMGWRRATRSFR

SEQ ID NO: 27451 - protein, 80 aa, Synthetic construct
YDLNDMEFKEMGMPELDEYTMERVLEEFEQRCYDNMNHAIETEEGLGIEYDEDVVCDVCQSPDGEDGNEMGWRRATRSFR

SEQ ID NO: 27452 - protein, 80 aa, Synthetic construct
YDLNDMDAKEMGMPELDEYTMERVLEEFEQRCYDNMNHAIETEEGLGIEYDEDVVCDVCQSPDGEDGNEMGWRRATRSFR

SEQ ID NO: 27453 - protein, 80 aa, Synthetic construct
YDLNDMDAAWMGMPELDEYTMERVLEEFEQRCYDNMNHAIETEEGLGIEYDEDVVCDVCQSPDGEDGNEMGWRRATRSFR

SEQ ID NO: 27454 - protein, 80 aa, Synthetic construct
YDLNDMDAAWLEMPELDEYTMERVLEEFEQRCYDNMNHAIETEEGLGIEYDEDVVCDVCQSPDGEDGNEMGWRRATRSFR

SEQ ID NO: 27455 - protein, 80 aa, Synthetic construct
YDLNDMDAAWLELTNEDEYTMERVLEEFEQRCYDNMNHAIETEEGLGIEYDEDVVCDVCQSPDGEDGNEMGWRRATRSFR

SEQ ID NO: 27456 - protein, 80 aa, Synthetic construct
YDLNDMDAAWLELTNEEFKEMGRVLEEFEQRCYDNMNHAIETEEGLGIEYDEDVVCDVCQSPDGEDGNEMGWRRATRSFR

SEQ ID NO: 27457 - protein, 80 aa, Synthetic construct
YDLNDMDAAWLELTNEEFKEMGMPELDEYTMERVLEEFAIETEEGLGIEYDEDVVCDVCQSPDGEDGNEMGWRRATRSFR

SEQ ID NO: 27458 - protein, 80 aa, Synthetic construct
YDLNDMDAAWLELTNEEFKEMGMPELDEYTMERVLEEFEQETEEGLGIEYDEDVVCDVCQSPDGEDGNEMGWRRATRSFR

SEQ ID NO: 27459 - protein, 80 aa, Synthetic construct
YDLNDMDAAWLELTNEEFKEMGMPELDEYTMERVLEEFEQRCEEGLGIEYDEDVVCDVCQSPDGEDGNEMGWRRATRSFR

SEQ ID NO: 27460 - protein, 80 aa, Synthetic construct
YDLNDMDAAWLELTNEEFKEMGMPELDEYTMERVLEEFEQRCYDGLGIEYDEDVVCDVCQSPDGEDGNEMGWRRATRSFR

SEQ ID NO: 27461 - protein, 80 aa, Synthetic construct
YDLNDMDAAWLELTNEEFKEMGMPELDEYTMERVLEEFEQRCYDNMGIEYDEDVVCDVCQSPDGEDGNEMGWRRATRSFR

SEQ ID NO: 27462 - protein, 80 aa, Synthetic construct
YDLNDMDAAWLELTNEEFKEMGMPELDEYTMERVLEEFEQRCYDNMNHEYDEDVVCDVCQSPDGEDGNEMGWRRATRSFR

SEQ ID NO: 27463 - protein, 80 aa, Synthetic construct
YDLNDMDAAWLELTNEEFKEMGMPELDEYTMERVLEEFEQRCYDNMNHAIDEDVVCDVCQSPDGEDGNEMGWRRATRSFR

SEQ ID NO: 27464 - protein, 80 aa, Synthetic construct
YDLNDMDAAWLELTNEEFKEMGMPELDEYTMERVLEEFEQRCYDNMNHAIETDVVCDVCQSPDGEDGNEMGWRRATRSFR

SEQ ID NO: 27465 - protein, 80 aa, Synthetic construct
YDLNDMDAAWLELTNEEFKEMGMPELDEYTMERVLEEFEQRCYDNMNHAIETEEVCDVCQSPDGEDGNEMGWRRATRSFR

SEQ ID NO: 27466 - protein, 80 aa, Synthetic construct
YDLNDMDAAWLELTNEEFKEMGMPELDEYTMERVLEEFEQRCYDNMNHAIETEEGLDVCQSPDGEDGNEMGWRRATRSFR

SEQ ID NO: 27467 - protein, 80 aa, Synthetic construct
YDLNDMDAAWLELTNEEFKEMGMPELDEYTMERVLEEFEQRCYDNMNHAIETEEGLGIEYSPDGEDGNEMGWRRATRSFR

SEQ ID NO: 27468 - protein, 80 aa, Synthetic construct
YDLNDMDAAWLELTNEEFKEMGMPELDEYTMERVLEEFEQRCYDNMNHAIETEEGLGIEYDEDGEDGNEMGWRRATRSFR

SEQ ID NO: 27469 - protein, 80 aa, Synthetic construct
YDLNDMDAAWLELTNEEFKEMGMPELDEYTMERVLEEFEQRCYDNMNHAIETEEGLGIEYDEDVEDGNEMGWRRATRSFR

SEQ ID NO: 27470 - protein, 80 aa, Synthetic construct
YDLNDMDAAWLELTNEEFKEMGMPELDEYTMERVLEEFEQRCYDNMNHAIETEEGLGIEYDEDVVCGNEMGWRRATRSFR

SEQ ID NO: 27471 - protein, 80 aa, Synthetic construct
YDLNDMDAAWLELTNEEFKEMGMPELDEYTMERVLEEFEQRCYDNMNHAIETEEGLGIEYDEDVVCDVEMGWRRATRSFR

SEQ ID NO: 27472 - protein, 80 aa, Synthetic construct
WRQEWEKGVQVPAGAEAIPEPVVRILPPLEGPPAQASPSSTMLGEGSQPDWPGGSRYDLDEIDAYWLELIGWRRATRSFR

SEQ ID NO: 27473 - protein, 80 aa, Synthetic construct
PDQEWEKGVQVPAGAEAIPEPVVRILPPLEGPPAQASPSSTMLGEGSQPDWPGGSRYDLDEIDAYWLELIGWRRATRSFR

SEQ ID NO: 27474 - protein, 80 aa, Synthetic construct
PDDYWEKGVQVPAGAEAIPEPVVRILPPLEGPPAQASPSSTMLGEGSQPDWPGGSRYDLDEIDAYWLELIGWRRATRSFR

SEQ ID NO: 27475 - protein, 80 aa, Synthetic construct
PDDYYIKGVQVPAGAEAIPEPVVRILPPLEGPPAQASPSSTMLGEGSQPDWPGGSRYDLDEIDAYWLELIGWRRATRSFR

SEQ ID NO: 27476 - protein, 80 aa, Synthetic construct
PDDYYILADPVPAGAEAIPEPVVRILPPLEGPPAQASPSSTMLGEGSQPDWPGGSRYDLDEIDAYWLELIGWRRATRSFR

SEQ ID NO: 27477 - protein, 80 aa, Synthetic construct
PDDYYILADPWRAGAEAIPEPVVRILPPLEGPPAQASPSSTMLGEGSQPDWPGGSRYDLDEIDAYWLELIGWRRATRSFR

SEQ ID NO: 27478 - protein, 80 aa, Synthetic construct
PDDYYILADPWRQEAEAIPEPVVRILPPLEGPPAQASPSSTMLGEGSQPDWPGGSRYDLDEIDAYWLELIGWRRATRSFR

SEQ ID NO: 27479 - protein, 80 aa, Synthetic construct
PDDYYILADPWRQEWEAIPEPVVRILPPLEGPPAQASPSSTMLGEGSQPDWPGGSRYDLDEIDAYWLELIGWRRATRSFR

SEQ ID NO: 27480 - protein, 80 aa, Synthetic construct
PDDYYILADPWRQEWEKGPEPVVRILPPLEGPPAQASPSSTMLGEGSQPDWPGGSRYDLDEIDAYWLELIGWRRATRSFR

SEQ ID NO: 27481 - protein, 80 aa, Synthetic construct
PDDYYILADPWRQEWEKGVQPVVRILPPLEGPPAQASPSSTMLGEGSQPDWPGGSRYDLDEIDAYWLELIGWRRATRSFR

SEQ ID NO: 27482 - protein, 80 aa, Synthetic construct
PDDYYILADPWRQEWEKGVQVPVRILPPLEGPPAQASPSSTMLGEGSQPDWPGGSRYDLDEIDAYWLELIGWRRATRSFR

SEQ ID NO: 27483 - protein, 80 aa, Synthetic construct
PDDYYILADPWRQEWEKGVQVPAGILPPLEGPPAQASPSSTMLGEGSQPDWPGGSRYDLDEIDAYWLELIGWRRATRSFR

SEQ ID NO: 27484 - protein, 80 aa, Synthetic construct
PDDYYILADPWRQEWEKGVQVPAGAEPPLEGPPAQASPSSTMLGEGSQPDWPGGSRYDLDEIDAYWLELIGWRRATRSFR

SEQ ID NO: 27485 - protein, 80 aa, Synthetic construct
PDDYYILADPWRQEWEKGVQVPAGAEAILEGPPAQASPSSTMLGEGSQPDWPGGSRYDLDEIDAYWLELIGWRRATRSFR

SEQ ID NO: 27486 - protein, 80 aa, Synthetic construct
PDDYYILADPWRQEWEKGVQVPAGAEAIPEGPPAQASPSSTMLGEGSQPDWPGGSRYDLDEIDAYWLELIGWRRATRSFR

SEQ ID NO: 27487 - protein, 80 aa, Synthetic construct
PDDYYILADPWRQEWEKGVQVPAGAEAIPEPVPAQASPSSTMLGEGSQPDWPGGSRYDLDEIDAYWLELIGWRRATRSFR

SEQ ID NO: 27488 - protein, 80 aa, Synthetic construct
PDDYYILADPWRQEWEKGVQVPAGAEAIPEPVVRQASPSSTMLGEGSQPDWPGGSRYDLDEIDAYWLELIGWRRATRSFR

SEQ ID NO: 27489 - protein, 80 aa, Synthetic construct
PDDYYILADPWRQEWEKGVQVPAGAEAIPEPVVRILSPSSTMLGEGSQPDWPGGSRYDLDEIDAYWLELIGWRRATRSFR

SEQ ID NO: 27490 - protein, 80 aa, Synthetic construct
PDDYYILADPWRQEWEKGVQVPAGAEAIPEPVVRILPPSSTMLGEGSQPDWPGGSRYDLDEIDAYWLELIGWRRATRSFR

SEQ ID NO: 27491 - protein, 80 aa, Synthetic construct
PDDYYILADPWRQEWEKGVQVPAGAEAIPEPVVRILPPLETMLGEGSQPDWPGGSRYDLDEIDAYWLELIGWRRATRSFR

SEQ ID NO: 27492 - protein, 80 aa, Synthetic construct
PDDYYILADPWRQEWEKGVQVPAGAEAIPEPVVRILPPLEGPLGEGSQPDWPGGSRYDLDEIDAYWLELIGWRRATRSFR

SEQ ID NO: 27493 - protein, 80 aa, Synthetic construct
PDDYYILADPWRQEWEKGVQVPAGAEAIPEPVVRILPPLEGPPAEGSQPDWPGGSRYDLDEIDAYWLELIGWRRATRSFR

SEQ ID NO: 27494 - protein, 80 aa, Synthetic construct
PDDYYILADPWRQEWEKGVQVPAGAEAIPEPVVRILPPLEGPPAQASQPDWPGGSRYDLDEIDAYWLELIGWRRATRSFR

SEQ ID NO: 27495 - protein, 80 aa, Synthetic construct
PDDYYILADPWRQEWEKGVQVPAGAEAIPEPVVRILPPLEGPPAQASPPDWPGGSRYDLDEIDAYWLELIGWRRATRSFR

SEQ ID NO: 27496 - protein, 80 aa, Synthetic construct
PDDYYILADPWRQEWEKGVQVPAGAEAIPEPVVRILPPLEGPPAQASPSSTMGGSRYDLDEIDAYWLELIGWRRATRSFR

SEQ ID NO: 27497 - protein, 80 aa, Synthetic construct
PDDYYILADPWRQEWEKGVQVPAGAEAIPEPVVRILPPLEGPPAQASPSSTMLGSRYDLDEIDAYWLELIGWRRATRSFR

SEQ ID NO: 27498 - protein, 80 aa, Synthetic construct
PDDYYILADPWRQEWEKGVQVPAGAEAIPEPVVRILPPLEGPPAQASPSSTMLGEGYDLDEIDAYWLELIGWRRATRSFR

SEQ ID NO: 27499 - protein, 80 aa, Synthetic construct
PDDYYILADPWRQEWEKGVQVPAGAEAIPEPVVRILPPLEGPPAQASPSSTMLGEGSQLDEIDAYWLELIGWRRATRSFR

SEQ ID NO: 27500 - protein, 80 aa, Synthetic construct
PDDYYILADPWRQEWEKGVQVPAGAEAIPEPVVRILPPLEGPPAQASPSSTMLGEGSQPDEIDAYWLELIGWRRATRSFR

SEQ ID NO: 27501 - protein, 80 aa, Synthetic construct
PDDYYILADPWRQEWEKGVQVPAGAEAIPEPVVRILPPLEGPPAQASPSSTMLGEGSQPDWPDAYWLELIGWRRATRSFR

SEQ ID NO: 27502 - protein, 80 aa, Synthetic construct
PDDYYILADPWRQEWEKGVQVPAGAEAIPEPVVRILPPLEGPPAQASPSSTMLGEGSQPDWPGGYWLELIGWRRATRSFR

SEQ ID NO: 27503 - protein, 80 aa, Synthetic construct
DLDDEDLENLNLDTEDGKVVELDTLDNLETNDPNLDDLLRSGEFDIIAYTDPELDMGDKKSMFNEELDLPGWRRATRSFR

SEQ ID NO: 27504 - protein, 80 aa, Synthetic construct
VKDDEDLENLNLDTEDGKVVELDTLDNLETNDPNLDDLLRSGEFDIIAYTDPELDMGDKKSMFNEELDLPGWRRATRSFR

SEQ ID NO: 27505 - protein, 80 aa, Synthetic construct
VKDLEGVEVKNLDTEDGKVVELDTLDNLETNDPNLDDLLRSGEFDIIAYTDPELDMGDKKSMFNEELDLPGWRRATRSFR

SEQ ID NO: 27506 - protein, 80 aa, Synthetic construct
VKDLEGVEVKDLDTEDGKVVELDTLDNLETNDPNLDDLLRSGEFDIIAYTDPELDMGDKKSMFNEELDLPGWRRATRSFR

SEQ ID NO: 27507 - protein, 80 aa, Synthetic construct
VKDLEGVEVKDLDDEDGKVVELDTLDNLETNDPNLDDLLRSGEFDIIAYTDPELDMGDKKSMFNEELDLPGWRRATRSFR

SEQ ID NO: 27508 - protein, 80 aa, Synthetic construct
VKDLEGVEVKDLDDEDLEVVELDTLDNLETNDPNLDDLLRSGEFDIIAYTDPELDMGDKKSMFNEELDLPGWRRATRSFR

SEQ ID NO: 27509 - protein, 80 aa, Synthetic construct
VKDLEGVEVKDLDDEDLENLELDTLDNLETNDPNLDDLLRSGEFDIIAYTDPELDMGDKKSMFNEELDLPGWRRATRSFR

SEQ ID NO: 27510 - protein, 80 aa, Synthetic construct
VKDLEGVEVKDLDDEDLENLNLDTLDNLETNDPNLDDLLRSGEFDIIAYTDPELDMGDKKSMFNEELDLPGWRRATRSFR

SEQ ID NO: 27511 - protein, 80 aa, Synthetic construct
VKDLEGVEVKDLDDEDLENLNLDTEDNLETNDPNLDDLLRSGEFDIIAYTDPELDMGDKKSMFNEELDLPGWRRATRSFR

SEQ ID NO: 27512 - protein, 80 aa, Synthetic construct
VKDLEGVEVKDLDDEDLENLNLDTEDGKVVNDPNLDDLLRSGEFDIIAYTDPELDMGDKKSMFNEELDLPGWRRATRSFR

SEQ ID NO: 27513 - protein, 80 aa, Synthetic construct
VKDLEGVEVKDLDDEDLENLNLDTEDGKVVELPNLDDLLRSGEFDIIAYTDPELDMGDKKSMFNEELDLPGWRRATRSFR

SEQ ID NO: 27514 - protein, 80 aa, Synthetic construct
VKDLEGVEVKDLDDEDLENLNLDTEDGKVVELDTLDDLLRSGEFDIIAYTDPELDMGDKKSMFNEELDLPGWRRATRSFR

SEQ ID NO: 27515 - protein, 80 aa, Synthetic construct
VKDLEGVEVKDLDDEDLENLNLDTEDGKVVELDTLDNLLRSGEFDIIAYTDPELDMGDKKSMFNEELDLPGWRRATRSFR

SEQ ID NO: 27516 - protein, 80 aa, Synthetic construct
VKDLEGVEVKDLDDEDLENLNLDTEDGKVVELDTLDNLETNDPNLDDLLRSGEFDIIAYTSMFNEELDLPGWRRATRSFR

SEQ ID NO: 27517 - protein, 80 aa, Synthetic construct
VKDLEGVEVKDLDDEDLENLNLDTEDGKVVELDTLDNLETNDPNLDDLLRSGEFDIIAYTDPFNEELDLPGWRRATRSFR

SEQ ID NO: 27518 - protein, 80 aa, Synthetic construct
VKDLEGVEVKDLDDEDLENLNLDTEDGKVVELDTLDNLETNDPNLDDLLRSGEFDIIAYTDPELEELDLPGWRRATRSFR

SEQ ID NO: 27519 - protein, 80 aa, Synthetic construct
VKDLEGVEVKDLDDEDLENLNLDTEDGKVVELDTLDNLETNDPNLDDLLRSGEFDIIAYTDPELDMLDLPGWRRATRSFR

SEQ ID NO: 27520 - protein, 80 aa, Synthetic construct
VKDLEGVEVKDLDDEDLENLNLDTEDGKVVELDTLDNLETNDPNLDDLLRSGEFDIIAYTDPELDMGDLPGWRRATRSFR

SEQ ID NO: 27521 - protein, 80 aa, Synthetic construct
VKDLEGVEVKDLDDEDLENLNLDTEDGKVVELDTLDNLETNDPNLDDLLRSGEFDIIAYTDPELDMGDKKGWRRATRSFR

SEQ ID NO: 27522 - protein, 80 aa, Synthetic construct
YNYCREDEEIYKEFFEVANDVIPNLLKEAASLLEAGEERPGEQSQGTQSQGSALQDPECFAHLLRFYDGIGWRRATRSFR

SEQ ID NO: 27523 - protein, 80 aa, Synthetic construct
WAYCREDEEIYKEFFEVANDVIPNLLKEAASLLEAGEERPGEQSQGTQSQGSALQDPECFAHLLRFYDGIGWRRATRSFR

SEQ ID NO: 27524 - protein, 80 aa, Synthetic construct
WADTREDEEIYKEFFEVANDVIPNLLKEAASLLEAGEERPGEQSQGTQSQGSALQDPECFAHLLRFYDGIGWRRATRSFR

SEQ ID NO: 27525 - protein, 80 aa, Synthetic construct
WADTATDEEIYKEFFEVANDVIPNLLKEAASLLEAGEERPGEQSQGTQSQGSALQDPECFAHLLRFYDGIGWRRATRSFR

SEQ ID NO: 27526 - protein, 80 aa, Synthetic construct
WADTATVIQDYNEFFEVANDVIPNLLKEAASLLEAGEERPGEQSQGTQSQGSALQDPECFAHLLRFYDGIGWRRATRSFR

SEQ ID NO: 27527 - protein, 80 aa, Synthetic construct
WADTATVIQDYNYCFEVANDVIPNLLKEAASLLEAGEERPGEQSQGTQSQGSALQDPECFAHLLRFYDGIGWRRATRSFR

SEQ ID NO: 27528 - protein, 80 aa, Synthetic construct
WADTATVIQDYNYCREDENDVIPNLLKEAASLLEAGEERPGEQSQGTQSQGSALQDPECFAHLLRFYDGIGWRRATRSFR

SEQ ID NO: 27529 - protein, 80 aa, Synthetic construct
WADTATVIQDYNYCREDEEIVIPNLLKEAASLLEAGEERPGEQSQGTQSQGSALQDPECFAHLLRFYDGIGWRRATRSFR

SEQ ID NO: 27530 - protein, 80 aa, Synthetic construct
WADTATVIQDYNYCREDEEIYKEFFEVAAASLLEAGEERPGEQSQGTQSQGSALQDPECFAHLLRFYDGIGWRRATRSFR

SEQ ID NO: 27531 - protein, 80 aa, Synthetic construct
WADTATVIQDYNYCREDEEIYKEFFEVANDSLLEAGEERPGEQSQGTQSQGSALQDPECFAHLLRFYDGIGWRRATRSFR

SEQ ID NO: 27532 - protein, 80 aa, Synthetic construct
WADTATVIQDYNYCREDEEIYKEFFEVANDVILEAGEERPGEQSQGTQSQGSALQDPECFAHLLRFYDGIGWRRATRSFR

SEQ ID NO: 27533 - protein, 80 aa, Synthetic construct
WADTATVIQDYNYCREDEEIYKEFFEVANDVIPNAGEERPGEQSQGTQSQGSALQDPECFAHLLRFYDGIGWRRATRSFR

SEQ ID NO: 27534 - protein, 80 aa, Synthetic construct
WADTATVIQDYNYCREDEEIYKEFFEVANDVIPNLLEERPGEQSQGTQSQGSALQDPECFAHLLRFYDGIGWRRATRSFR

SEQ ID NO: 27535 - protein, 80 aa, Synthetic construct
WADTATVIQDYNYCREDEEIYKEFFEVANDVIPNLLKERPGEQSQGTQSQGSALQDPECFAHLLRFYDGIGWRRATRSFR

SEQ ID NO: 27536 - protein, 80 aa, Synthetic construct
WADTATVIQDYNYCREDEEIYKEFFEVANDVIPNLLKEAASLLEAGEERPGEQSQDPECFAHLLRFYDGIGWRRATRSFR

SEQ ID NO: 27537 - protein, 80 aa, Synthetic construct
WADTATVIQDYNYCREDEEIYKEFFEVANDVIPNLLKEAASLLEAGEERPGEQSQGTQSQAHLLRFYDGIGWRRATRSFR

SEQ ID NO: 27538 - protein, 80 aa, Synthetic construct
WADTATVIQDYNYCREDEEIYKEFFEVANDVIPNLLKEAASLLEAGEERPGEQSQGTQSQGSLLRFYDGIGWRRATRSFR

SEQ ID NO: 27539 - protein, 80 aa, Synthetic construct
WADTATVIQDYNYCREDEEIYKEFFEVANDVIPNLLKEAASLLEAGEERPGEQSQGTQSQGSALRFYDGIGWRRATRSFR

SEQ ID NO: 27540 - protein, 80 aa, Synthetic construct
WADTATVIQDYNYCREDEEIYKEFFEVANDVIPNLLKEAASLLEAGEERPGEQSQGTQSQGSALQDYDGIGWRRATRSFR

SEQ ID NO: 27541 - protein, 80 aa, Synthetic construct
WADTATVIQDYNYCREDEEIYKEFFEVANDVIPNLLKEAASLLEAGEERPGEQSQGTQSQGSALQDPECFGWRRATRSFR

SEQ ID NO: 27542 - protein, 80 aa, Synthetic construct
VDLSGENLSDVDFLDDSSTESLLLSGDEYNQDFDSTNFEESQDEDDALNEIVRCICEMDEENGFMIQCEEGWRRATRSFR

SEQ ID NO: 27543 - protein, 80 aa, Synthetic construct
TYLSGENLSDVDFLDDSSTESLLLSGDEYNQDFDSTNFEESQDEDDALNEIVRCICEMDEENGFMIQCEEGWRRATRSFR

SEQ ID NO: 27544 - protein, 80 aa, Synthetic construct
TYQYGENLSDVDFLDDSSTESLLLSGDEYNQDFDSTNFEESQDEDDALNEIVRCICEMDEENGFMIQCEEGWRRATRSFR

SEQ ID NO: 27545 - protein, 80 aa, Synthetic construct
TYQYPRNLSDVDFLDDSSTESLLLSGDEYNQDFDSTNFEESQDEDDALNEIVRCICEMDEENGFMIQCEEGWRRATRSFR

SEQ ID NO: 27546 - protein, 80 aa, Synthetic construct
TYQYPRAISDVDFLDDSSTESLLLSGDEYNQDFDSTNFEESQDEDDALNEIVRCICEMDEENGFMIQCEEGWRRATRSFR

SEQ ID NO: 27547 - protein, 80 aa, Synthetic construct
TYQYPRAILSVDFLDDSSTESLLLSGDEYNQDFDSTNFEESQDEDDALNEIVRCICEMDEENGFMIQCEEGWRRATRSFR

SEQ ID NO: 27548 - protein, 80 aa, Synthetic construct
TYQYPRAILSVDLSGESSTESLLLSGDEYNQDFDSTNFEESQDEDDALNEIVRCICEMDEENGFMIQCEEGWRRATRSFR

SEQ ID NO: 27549 - protein, 80 aa, Synthetic construct
TYQYPRAILSVDLSGENLTESLLLSGDEYNQDFDSTNFEESQDEDDALNEIVRCICEMDEENGFMIQCEEGWRRATRSFR

SEQ ID NO: 27550 - protein, 80 aa, Synthetic construct
TYQYPRAILSVDLSGENLSDSLLLSGDEYNQDFDSTNFEESQDEDDALNEIVRCICEMDEENGFMIQCEEGWRRATRSFR

SEQ ID NO: 27551 - protein, 80 aa, Synthetic construct
TYQYPRAILSVDLSGENLSDVDLLSGDEYNQDFDSTNFEESQDEDDALNEIVRCICEMDEENGFMIQCEEGWRRATRSFR

SEQ ID NO: 27552 - protein, 80 aa, Synthetic construct
TYQYPRAILSVDLSGENLSDVDFLSGDEYNQDFDSTNFEESQDEDDALNEIVRCICEMDEENGFMIQCEEGWRRATRSFR

SEQ ID NO: 27553 - protein, 80 aa, Synthetic construct
TYQYPRAILSVDLSGENLSDVDFLDDDEYNQDFDSTNFEESQDEDDALNEIVRCICEMDEENGFMIQCEEGWRRATRSFR

SEQ ID NO: 27554 - protein, 80 aa, Synthetic construct
TYQYPRAILSVDLSGENLSDVDFLDDSSYNQDFDSTNFEESQDEDDALNEIVRCICEMDEENGFMIQCEEGWRRATRSFR

SEQ ID NO: 27555 - protein, 80 aa, Synthetic construct
TYQYPRAILSVDLSGENLSDVDFLDDSSTEQDFDSTNFEESQDEDDALNEIVRCICEMDEENGFMIQCEEGWRRATRSFR

SEQ ID NO: 27556 - protein, 80 aa, Synthetic construct
TYQYPRAILSVDLSGENLSDVDFLDDSSTESLFDSTNFEESQDEDDALNEIVRCICEMDEENGFMIQCEEGWRRATRSFR

SEQ ID NO: 27557 - protein, 80 aa, Synthetic construct
TYQYPRAILSVDLSGENLSDVDFLDDSSTESLLLSTNFEESQDEDDALNEIVRCICEMDEENGFMIQCEEGWRRATRSFR

SEQ ID NO: 27558 - protein, 80 aa, Synthetic construct
TYQYPRAILSVDLSGENLSDVDFLDDSSTESLLLSGNFEESQDEDDALNEIVRCICEMDEENGFMIQCEEGWRRATRSFR

SEQ ID NO: 27559 - protein, 80 aa, Synthetic construct
TYQYPRAILSVDLSGENLSDVDFLDDSSTESLLLSGDEYNSQDEDDALNEIVRCICEMDEENGFMIQCEEGWRRATRSFR

SEQ ID NO: 27560 - protein, 80 aa, Synthetic construct
TYQYPRAILSVDLSGENLSDVDFLDDSSTESLLLSGDEYNQDDEDDALNEIVRCICEMDEENGFMIQCEEGWRRATRSFR

SEQ ID NO: 27561 - protein, 80 aa, Synthetic construct
TYQYPRAILSVDLSGENLSDVDFLDDSSTESLLLSGDEYNQDFDDDALNEIVRCICEMDEENGFMIQCEEGWRRATRSFR

SEQ ID NO: 27562 - protein, 80 aa, Synthetic construct
TYQYPRAILSVDLSGENLSDVDFLDDSSTESLLLSGDEYNQDFDSTALNEIVRCICEMDEENGFMIQCEEGWRRATRSFR

SEQ ID NO: 27563 - protein, 80 aa, Synthetic construct
TYQYPRAILSVDLSGENLSDVDFLDDSSTESLLLSGDEYNQDFDSTNFEEIVRCICEMDEENGFMIQCEEGWRRATRSFR

SEQ ID NO: 27564 - protein, 80 aa, Synthetic construct
TYQYPRAILSVDLSGENLSDVDFLDDSSTESLLLSGDEYNQDFDSTNFEESQDEDDALNEIVRCICEMEEGWRRATRSFR

SEQ ID NO: 27565 - protein, 80 aa, Synthetic construct
LQLEYPDSLFDTEKMSPWDMELIPNNAVFPEELGTSVPLTDGECRSLIYKPLDGEWGTNPRDEECERIVAGWRRATRSFR

SEQ ID NO: 27566 - protein, 80 aa, Synthetic construct
LQLEYPDSLFQCEKMSPWDMELIPNNAVFPEELGTSVPLTDGECRSLIYKPLDGEWGTNPRDEECERIVAGWRRATRSFR

SEQ ID NO: 27567 - protein, 80 aa, Synthetic construct
LQLEYPDSLFQCYNMSPWDMELIPNNAVFPEELGTSVPLTDGECRSLIYKPLDGEWGTNPRDEECERIVAGWRRATRSFR

SEQ ID NO: 27568 - protein, 80 aa, Synthetic construct
LQLEYPDSLFQCYNVCPWDMELIPNNAVFPEELGTSVPLTDGECRSLIYKPLDGEWGTNPRDEECERIVAGWRRATRSFR

SEQ ID NO: 27569 - protein, 80 aa, Synthetic construct
LQLEYPDSLFQCYNVCWDDMELIPNNAVFPEELGTSVPLTDGECRSLIYKPLDGEWGTNPRDEECERIVAGWRRATRSFR

SEQ ID NO: 27570 - protein, 80 aa, Synthetic construct
LQLEYPDSLFQCYNVCWDNGELIPNNAVFPEELGTSVPLTDGECRSLIYKPLDGEWGTNPRDEECERIVAGWRRATRSFR

SEQ ID NO: 27571 - protein, 80 aa, Synthetic construct
LQLEYPDSLFQCYNVCWDNGDTIPNNAVFPEELGTSVPLTDGECRSLIYKPLDGEWGTNPRDEECERIVAGWRRATRSFR

SEQ ID NO: 27572 - protein, 80 aa, Synthetic construct
LQLEYPDSLFQCYNVCWDNGDTEKNNAVFPEELGTSVPLTDGECRSLIYKPLDGEWGTNPRDEECERIVAGWRRATRSFR

SEQ ID NO: 27573 - protein, 80 aa, Synthetic construct
LQLEYPDSLFQCYNVCWDNGDTEKMSAVFPEELGTSVPLTDGECRSLIYKPLDGEWGTNPRDEECERIVAGWRRATRSFR

SEQ ID NO: 27574 - protein, 80 aa, Synthetic construct
LQLEYPDSLFQCYNVCWDNGDTEKMSPWFPEELGTSVPLTDGECRSLIYKPLDGEWGTNPRDEECERIVAGWRRATRSFR

SEQ ID NO: 27575 - protein, 80 aa, Synthetic construct
LQLEYPDSLFQCYNVCWDNGDTEKMSPWDMEELGTSVPLTDGECRSLIYKPLDGEWGTNPRDEECERIVAGWRRATRSFR

SEQ ID NO: 27576 - protein, 80 aa, Synthetic construct
LQLEYPDSLFQCYNVCWDNGDTEKMSPWDMELLGTSVPLTDGECRSLIYKPLDGEWGTNPRDEECERIVAGWRRATRSFR

SEQ ID NO: 27577 - protein, 80 aa, Synthetic construct
LQLEYPDSLFQCYNVCWDNGDTEKMSPWDMELIPTSVPLTDGECRSLIYKPLDGEWGTNPRDEECERIVAGWRRATRSFR

SEQ ID NO: 27578 - protein, 80 aa, Synthetic construct
LQLEYPDSLFQCYNVCWDNGDTEKMSPWDMELIPNNVPLTDGECRSLIYKPLDGEWGTNPRDEECERIVAGWRRATRSFR

SEQ ID NO: 27579 - protein, 80 aa, Synthetic construct
LQLEYPDSLFQCYNVCWDNGDTEKMSPWDMELIPNNAVLTDGECRSLIYKPLDGEWGTNPRDEECERIVAGWRRATRSFR

SEQ ID NO: 27580 - protein, 80 aa, Synthetic construct
LQLEYPDSLFQCYNVCWDNGDTEKMSPWDMELIPNNAVFPDGECRSLIYKPLDGEWGTNPRDEECERIVAGWRRATRSFR

SEQ ID NO: 27581 - protein, 80 aa, Synthetic construct
LQLEYPDSLFQCYNVCWDNGDTEKMSPWDMELIPNNAVFPEEECRSLIYKPLDGEWGTNPRDEECERIVAGWRRATRSFR

SEQ ID NO: 27582 - protein, 80 aa, Synthetic construct
LQLEYPDSLFQCYNVCWDNGDTEKMSPWDMELIPNNAVFPEELGTSVPYKPLDGEWGTNPRDEECERIVAGWRRATRSFR

SEQ ID NO: 27583 - protein, 80 aa, Synthetic construct
LQLEYPDSLFQCYNVCWDNGDTEKMSPWDMELIPNNAVFPEELGTSVPLTPLDGEWGTNPRDEECERIVAGWRRATRSFR

SEQ ID NO: 27584 - protein, 80 aa, Synthetic construct
LQLEYPDSLFQCYNVCWDNGDTEKMSPWDMELIPNNAVFPEELGTSVPLTDGDGEWGTNPRDEECERIVAGWRRATRSFR

SEQ ID NO: 27585 - protein, 80 aa, Synthetic construct
LQLEYPDSLFQCYNVCWDNGDTEKMSPWDMELIPNNAVFPEELGTSVPLTDGECEWGTNPRDEECERIVAGWRRATRSFR

SEQ ID NO: 27586 - protein, 80 aa, Synthetic construct
LQLEYPDSLFQCYNVCWDNGDTEKMSPWDMELIPNNAVFPEELGTSVPLTDGECRSGTNPRDEECERIVAGWRRATRSFR

SEQ ID NO: 27587 - protein, 80 aa, Synthetic construct
LQLEYPDSLFQCYNVCWDNGDTEKMSPWDMELIPNNAVFPEELGTSVPLTDGECRSLINPRDEECERIVAGWRRATRSFR

SEQ ID NO: 27588 - protein, 80 aa, Synthetic construct
LQLEYPDSLFQCYNVCWDNGDTEKMSPWDMELIPNNAVFPEELGTSVPLTDGECRSLIYKRDEECERIVAGWRRATRSFR

SEQ ID NO: 27589 - protein, 80 aa, Synthetic construct
LQLEYPDSLFQCYNVCWDNGDTEKMSPWDMELIPNNAVFPEELGTSVPLTDGECRSLIYKPLEECERIVAGWRRATRSFR

SEQ ID NO: 27590 - protein, 80 aa, Synthetic construct
LQLEYPDSLFQCYNVCWDNGDTEKMSPWDMELIPNNAVFPEELGTSVPLTDGECRSLIYKPLDGCERIVAGWRRATRSFR

SEQ ID NO: 27591 - protein, 80 aa, Synthetic construct
LQLEYPDSLFQCYNVCWDNGDTEKMSPWDMELIPNNAVFPEELGTSVPLTDGECRSLIYKPLDGEWGTVAGWRRATRSFR

SEQ ID NO: 27592 - protein, 80 aa, Synthetic construct
LQLEYPDSLFQCYNVCWDNGDTEKMSPWDMELIPNNAVFPEELGTSVPLTDGECRSLIYKPLDGEWGTNPGWRRATRSFR

SEQ ID NO: 27593 - protein, 80 aa, Synthetic construct
LDVNDLDTDSFLGGLKWCSDQSEIISNQYNNEPSNIFEKIDEENEANLLAVLTETLDSLPVDEDGLPSFDGWRRATRSFR

SEQ ID NO: 27594 - protein, 80 aa, Synthetic construct
PDVNDLDTDSFLGGLKWCSDQSEIISNQYNNEPSNIFEKIDEENEANLLAVLTETLDSLPVDEDGLPSFDGWRRATRSFR

SEQ ID NO: 27595 - protein, 80 aa, Synthetic construct
PDLPDLDTDSFLGGLKWCSDQSEIISNQYNNEPSNIFEKIDEENEANLLAVLTETLDSLPVDEDGLPSFDGWRRATRSFR

SEQ ID NO: 27596 - protein, 80 aa, Synthetic construct
PDLPELDLDSFLGGLKWCSDQSEIISNQYNNEPSNIFEKIDEENEANLLAVLTETLDSLPVDEDGLPSFDGWRRATRSFR

SEQ ID NO: 27597 - protein, 80 aa, Synthetic construct
PDLPELDLSEFLGGLKWCSDQSEIISNQYNNEPSNIFEKIDEENEANLLAVLTETLDSLPVDEDGLPSFDGWRRATRSFR

SEQ ID NO: 27598 - protein, 80 aa, Synthetic construct
PDLPELDLSELDGGLKWCSDQSEIISNQYNNEPSNIFEKIDEENEANLLAVLTETLDSLPVDEDGLPSFDGWRRATRSFR

SEQ ID NO: 27599 - protein, 80 aa, Synthetic construct
PDLPELDLSELDVNLKWCSDQSEIISNQYNNEPSNIFEKIDEENEANLLAVLTETLDSLPVDEDGLPSFDGWRRATRSFR

SEQ ID NO: 27600 - protein, 80 aa, Synthetic construct
PDLPELDLSELDVNDLWCSDQSEIISNQYNNEPSNIFEKIDEENEANLLAVLTETLDSLPVDEDGLPSFDGWRRATRSFR

SEQ ID NO: 27601 - protein, 80 aa, Synthetic construct
PDLPELDLSELDVNDLDTDSFLEIISNQYNNEPSNIFEKIDEENEANLLAVLTETLDSLPVDEDGLPSFDGWRRATRSFR

SEQ ID NO: 27602 - protein, 80 aa, Synthetic construct
PDLPELDLSELDVNDLDTDSFLGGISNQYNNEPSNIFEKIDEENEANLLAVLTETLDSLPVDEDGLPSFDGWRRATRSFR

SEQ ID NO: 27603 - protein, 80 aa, Synthetic construct
PDLPELDLSELDVNDLDTDSFLGGLKNQYNNEPSNIFEKIDEENEANLLAVLTETLDSLPVDEDGLPSFDGWRRATRSFR

SEQ ID NO: 27604 - protein, 80 aa, Synthetic construct
PDLPELDLSELDVNDLDTDSFLGGLKWCYNNEPSNIFEKIDEENEANLLAVLTETLDSLPVDEDGLPSFDGWRRATRSFR

SEQ ID NO: 27605 - protein, 80 aa, Synthetic construct
PDLPELDLSELDVNDLDTDSFLGGLKWCSDNEPSNIFEKIDEENEANLLAVLTETLDSLPVDEDGLPSFDGWRRATRSFR

SEQ ID NO: 27606 - protein, 80 aa, Synthetic construct
PDLPELDLSELDVNDLDTDSFLGGLKWCSDQSPSNIFEKIDEENEANLLAVLTETLDSLPVDEDGLPSFDGWRRATRSFR

SEQ ID NO: 27607 - protein, 80 aa, Synthetic construct
PDLPELDLSELDVNDLDTDSFLGGLKWCSDQSEINIFEKIDEENEANLLAVLTETLDSLPVDEDGLPSFDGWRRATRSFR

SEQ ID NO: 27608 - protein, 80 aa, Synthetic construct
PDLPELDLSELDVNDLDTDSFLGGLKWCSDQSEIISFEKIDEENEANLLAVLTETLDSLPVDEDGLPSFDGWRRATRSFR

SEQ ID NO: 27609 - protein, 80 aa, Synthetic construct
PDLPELDLSELDVNDLDTDSFLGGLKWCSDQSEIISNQYNDEENEANLLAVLTETLDSLPVDEDGLPSFDGWRRATRSFR

SEQ ID NO: 27610 - protein, 80 aa, Synthetic construct
PDLPELDLSELDVNDLDTDSFLGGLKWCSDQSEIISNQYNNEENEANLLAVLTETLDSLPVDEDGLPSFDGWRRATRSFR

SEQ ID NO: 27611 - protein, 80 aa, Synthetic construct
PDLPELDLSELDVNDLDTDSFLGGLKWCSDQSEIISNQYNNEPSEANLLAVLTETLDSLPVDEDGLPSFDGWRRATRSFR

SEQ ID NO: 27612 - protein, 80 aa, Synthetic construct
PDLPELDLSELDVNDLDTDSFLGGLKWCSDQSEIISNQYNNEPSNINLLAVLTETLDSLPVDEDGLPSFDGWRRATRSFR

SEQ ID NO: 27613 - protein, 80 aa, Synthetic construct
PDLPELDLSELDVNDLDTDSFLGGLKWCSDQSEIISNQYNNEPSNIFELAVLTETLDSLPVDEDGLPSFDGWRRATRSFR

SEQ ID NO: 27614 - protein, 80 aa, Synthetic construct
PDLPELDLSELDVNDLDTDSFLGGLKWCSDQSEIISNQYNNEPSNIFEKIDEENEANLLAVLTETLPSFDGWRRATRSFR

SEQ ID NO: 27615 - protein, 80 aa, Synthetic construct
PDLPELDLSELDVNDLDTDSFLGGLKWCSDQSEIISNQYNNEPSNIFEKIDEENEANLLAVLTETLDSFDGWRRATRSFR

SEQ ID NO: 27616 - protein, 80 aa, Synthetic construct
PDLPELDLSELDVNDLDTDSFLGGLKWCSDQSEIISNQYNNEPSNIFEKIDEENEANLLAVLTETLDSLPGWRRATRSFR

SEQ ID NO: 27617 - protein, 80 aa, Synthetic construct
GQIFCLHGGLSPSIDTLDHIRALDRLQEVPHEGPMCDLLWSDPDDRGGWGISPRGAGYTFGQDISETFNHGWRRATRSFR

SEQ ID NO: 27618 - protein, 80 aa, Synthetic construct
DYIFCLHGGLSPSIDTLDHIRALDRLQEVPHEGPMCDLLWSDPDDRGGWGISPRGAGYTFGQDISETFNHGWRRATRSFR

SEQ ID NO: 27619 - protein, 80 aa, Synthetic construct
DYLPCLHGGLSPSIDTLDHIRALDRLQEVPHEGPMCDLLWSDPDDRGGWGISPRGAGYTFGQDISETFNHGWRRATRSFR

SEQ ID NO: 27620 - protein, 80 aa, Synthetic construct
DYLPLTHGGLSPSIDTLDHIRALDRLQEVPHEGPMCDLLWSDPDDRGGWGISPRGAGYTFGQDISETFNHGWRRATRSFR

SEQ ID NO: 27621 - protein, 80 aa, Synthetic construct
DYLPLTALGLSPSIDTLDHIRALDRLQEVPHEGPMCDLLWSDPDDRGGWGISPRGAGYTFGQDISETFNHGWRRATRSFR

SEQ ID NO: 27622 - protein, 80 aa, Synthetic construct
DYLPLTALVDSPSIDTLDHIRALDRLQEVPHEGPMCDLLWSDPDDRGGWGISPRGAGYTFGQDISETFNHGWRRATRSFR

SEQ ID NO: 27623 - protein, 80 aa, Synthetic construct
DYLPLTALVDGQSIDTLDHIRALDRLQEVPHEGPMCDLLWSDPDDRGGWGISPRGAGYTFGQDISETFNHGWRRATRSFR

SEQ ID NO: 27624 - protein, 80 aa, Synthetic construct
DYLPLTALVDGQIFDTLDHIRALDRLQEVPHEGPMCDLLWSDPDDRGGWGISPRGAGYTFGQDISETFNHGWRRATRSFR

SEQ ID NO: 27625 - protein, 80 aa, Synthetic construct
DYLPLTALVDGQIFCLHGGLSPLDRLQEVPHEGPMCDLLWSDPDDRGGWGISPRGAGYTFGQDISETFNHGWRRATRSFR

SEQ ID NO: 27626 - protein, 80 aa, Synthetic construct
DYLPLTALVDGQIFCLHGGLSPSIRLQEVPHEGPMCDLLWSDPDDRGGWGISPRGAGYTFGQDISETFNHGWRRATRSFR

SEQ ID NO: 27627 - protein, 80 aa, Synthetic construct
DYLPLTALVDGQIFCLHGGLSPSIDTQEVPHEGPMCDLLWSDPDDRGGWGISPRGAGYTFGQDISETFNHGWRRATRSFR

SEQ ID NO: 27628 - protein, 80 aa, Synthetic construct
DYLPLTALVDGQIFCLHGGLSPSIDTLDVPHEGPMCDLLWSDPDDRGGWGISPRGAGYTFGQDISETFNHGWRRATRSFR

SEQ ID NO: 27629 - protein, 80 aa, Synthetic construct
DYLPLTALVDGQIFCLHGGLSPSIDTLDHIHEGPMCDLLWSDPDDRGGWGISPRGAGYTFGQDISETFNHGWRRATRSFR

SEQ ID NO: 27630 - protein, 80 aa, Synthetic construct
DYLPLTALVDGQIFCLHGGLSPSIDTLDHIRALDRLQEVPHEGPMCDLWGISPRGAGYTFGQDISETFNHGWRRATRSFR

SEQ ID NO: 27631 - protein, 80 aa, Synthetic construct
DYLPLTALVDGQIFCLHGGLSPSIDTLDHIRALDRLQEVPHEGPMCDLLWSDPRGAGYTFGQDISETFNHGWRRATRSFR

SEQ ID NO: 27632 - protein, 80 aa, Synthetic construct
DYLPLTALVDGQIFCLHGGLSPSIDTLDHIRALDRLQEVPHEGPMCDLLWSDPDGAGYTFGQDISETFNHGWRRATRSFR

SEQ ID NO: 27633 - protein, 80 aa, Synthetic construct
DYLPLTALVDGQIFCLHGGLSPSIDTLDHIRALDRLQEVPHEGPMCDLLWSDPDDRGYTFGQDISETFNHGWRRATRSFR

SEQ ID NO: 27634 - protein, 80 aa, Synthetic construct
DYLPLTALVDGQIFCLHGGLSPSIDTLDHIRALDRLQEVPHEGPMCDLLWSDPDDRGGTFGQDISETFNHGWRRATRSFR

SEQ ID NO: 27635 - protein, 80 aa, Synthetic construct
DYLPLTALVDGQIFCLHGGLSPSIDTLDHIRALDRLQEVPHEGPMCDLLWSDPDDRGGWGGQDISETFNHGWRRATRSFR

SEQ ID NO: 27636 - protein, 80 aa, Synthetic construct
DYLPLTALVDGQIFCLHGGLSPSIDTLDHIRALDRLQEVPHEGPMCDLLWSDPDDRGGWGISDISETFNHGWRRATRSFR

SEQ ID NO: 27637 - protein, 80 aa, Synthetic construct
DYLPLTALVDGQIFCLHGGLSPSIDTLDHIRALDRLQEVPHEGPMCDLLWSDPDDRGGWGISPRSETFNHGWRRATRSFR

SEQ ID NO: 27638 - protein, 80 aa, Synthetic construct
DYLPLTALVDGQIFCLHGGLSPSIDTLDHIRALDRLQEVPHEGPMCDLLWSDPDDRGGWGISPRGATFNHGWRRATRSFR

SEQ ID NO: 27639 - protein, 80 aa, Synthetic construct
DYLPLTALVDGQIFCLHGGLSPSIDTLDHIRALDRLQEVPHEGPMCDLLWSDPDDRGGWGISPRGAGYNHGWRRATRSFR

SEQ ID NO: 27640 - protein, 80 aa, Synthetic construct
SQPGALIPGDPQAMSQPNRGPSPFSPVQLHQLRAQILAYKMLARGQPLPETLQLAVQGKRTLPGLQQQQQGWRRATRSFR

SEQ ID NO: 27641 - protein, 80 aa, Synthetic construct
GGPGALIPGDPQAMSQPNRGPSPFSPVQLHQLRAQILAYKMLARGQPLPETLQLAVQGKRTLPGLQQQQQGWRRATRSFR

SEQ ID NO: 27642 - protein, 80 aa, Synthetic construct
GGPTALIPGDPQAMSQPNRGPSPFSPVQLHQLRAQILAYKMLARGQPLPETLQLAVQGKRTLPGLQQQQQGWRRATRSFR

SEQ ID NO: 27643 - protein, 80 aa, Synthetic construct
GGPTPPIPGDPQAMSQPNRGPSPFSPVQLHQLRAQILAYKMLARGQPLPETLQLAVQGKRTLPGLQQQQQGWRRATRSFR

SEQ ID NO: 27644 - protein, 80 aa, Synthetic construct
GGPTPPQMGDPQAMSQPNRGPSPFSPVQLHQLRAQILAYKMLARGQPLPETLQLAVQGKRTLPGLQQQQQGWRRATRSFR

SEQ ID NO: 27645 - protein, 80 aa, Synthetic construct
GGPTPPQMPPPQAMSQPNRGPSPFSPVQLHQLRAQILAYKMLARGQPLPETLQLAVQGKRTLPGLQQQQQGWRRATRSFR

SEQ ID NO: 27646 - protein, 80 aa, Synthetic construct
GGPTPPQMPPSQAMSQPNRGPSPFSPVQLHQLRAQILAYKMLARGQPLPETLQLAVQGKRTLPGLQQQQQGWRRATRSFR

SEQ ID NO: 27647 - protein, 80 aa, Synthetic construct
GGPTPPQMPPSQPGSQPNRGPSPFSPVQLHQLRAQILAYKMLARGQPLPETLQLAVQGKRTLPGLQQQQQGWRRATRSFR

SEQ ID NO: 27648 - protein, 80 aa, Synthetic construct
GGPTPPQMPPSQPGALPNRGPSPFSPVQLHQLRAQILAYKMLARGQPLPETLQLAVQGKRTLPGLQQQQQGWRRATRSFR

SEQ ID NO: 27649 - protein, 80 aa, Synthetic construct
GGPTPPQMPPSQPGALIPRGPSPFSPVQLHQLRAQILAYKMLARGQPLPETLQLAVQGKRTLPGLQQQQQGWRRATRSFR

SEQ ID NO: 27650 - protein, 80 aa, Synthetic construct
GGPTPPQMPPSQPGALIPGDPSPFSPVQLHQLRAQILAYKMLARGQPLPETLQLAVQGKRTLPGLQQQQQGWRRATRSFR

SEQ ID NO: 27651 - protein, 80 aa, Synthetic construct
GGPTPPQMPPSQPGALIPGDPQPFSPVQLHQLRAQILAYKMLARGQPLPETLQLAVQGKRTLPGLQQQQQGWRRATRSFR

SEQ ID NO: 27652 - protein, 80 aa, Synthetic construct
GGPTPPQMPPSQPGALIPGDPQAMSPVQLHQLRAQILAYKMLARGQPLPETLQLAVQGKRTLPGLQQQQQGWRRATRSFR

SEQ ID NO: 27653 - protein, 80 aa, Synthetic construct
GGPTPPQMPPSQPGALIPGDPQAMSQVQLHQLRAQILAYKMLARGQPLPETLQLAVQGKRTLPGLQQQQQGWRRATRSFR

SEQ ID NO: 27654 - protein, 80 aa, Synthetic construct
GGPTPPQMPPSQPGALIPGDPQAMSQPNLHQLRAQILAYKMLARGQPLPETLQLAVQGKRTLPGLQQQQQGWRRATRSFR

SEQ ID NO: 27655 - protein, 80 aa, Synthetic construct
GGPTPPQMPPSQPGALIPGDPQAMSQPNRGPSPFSPVQLHQLRAQILAYKTLQLAVQGKRTLPGLQQQQQGWRRATRSFR

SEQ ID NO: 27656 - protein, 80 aa, Synthetic construct
GGPTPPQMPPSQPGALIPGDPQAMSQPNRGPSPFSPVQLHQLRAQILAYKMLQLAVQGKRTLPGLQQQQQGWRRATRSFR

SEQ ID NO: 27657 - protein, 80 aa, Synthetic construct
GGPTPPQMPPSQPGALIPGDPQAMSQPNRGPSPFSPVQLHQLRAQILAYKMLARAVQGKRTLPGLQQQQQGWRRATRSFR

SEQ ID NO: 27658 - protein, 80 aa, Synthetic construct
GGPTPPQMPPSQPGALIPGDPQAMSQPNRGPSPFSPVQLHQLRAQILAYKMLARGQQGKRTLPGLQQQQQGWRRATRSFR

SEQ ID NO: 27659 - protein, 80 aa, Synthetic construct
GGPTPPQMPPSQPGALIPGDPQAMSQPNRGPSPFSPVQLHQLRAQILAYKMLARGQPLKRTLPGLQQQQQGWRRATRSFR

SEQ ID NO: 27660 - protein, 80 aa, Synthetic construct
GGPTPPQMPPSQPGALIPGDPQAMSQPNRGPSPFSPVQLHQLRAQILAYKMLARGQPLPETLPGLQQQQQGWRRATRSFR

SEQ ID NO: 27661 - protein, 80 aa, Synthetic construct
GGPTPPQMPPSQPGALIPGDPQAMSQPNRGPSPFSPVQLHQLRAQILAYKMLARGQPLPETLQLLQQQQQGWRRATRSFR

SEQ ID NO: 27662 - protein, 80 aa, Synthetic construct
GGPTPPQMPPSQPGALIPGDPQAMSQPNRGPSPFSPVQLHQLRAQILAYKMLARGQPLPETLQLAVQQQQGWRRATRSFR

SEQ ID NO: 27663 - protein, 80 aa, Synthetic construct
GGPTPPQMPPSQPGALIPGDPQAMSQPNRGPSPFSPVQLHQLRAQILAYKMLARGQPLPETLQLAVQGQQGWRRATRSFR

SEQ ID NO: 27664 - protein, 80 aa, Synthetic construct
GGPTPPQMPPSQPGALIPGDPQAMSQPNRGPSPFSPVQLHQLRAQILAYKMLARGQPLPETLQLAVQGKRGWRRATRSFR

SEQ ID NO: 27665 - protein, 80 aa, Synthetic construct
TRNVMAYNVQQGFAPTLDDDKPWYSIFPIDNEDLVYGRWEDNIIWDAQAMPRLLEPPVLALDPNDENLILGWRRATRSFR

SEQ ID NO: 27666 - protein, 80 aa, Synthetic construct
SLNVMAYNVQQGFAPTLDDDKPWYSIFPIDNEDLVYGRWEDNIIWDAQAMPRLLEPPVLALDPNDENLILGWRRATRSFR

SEQ ID NO: 27667 - protein, 80 aa, Synthetic construct
SLAGMAYNVQQGFAPTLDDDKPWYSIFPIDNEDLVYGRWEDNIIWDAQAMPRLLEPPVLALDPNDENLILGWRRATRSFR

SEQ ID NO: 27668 - protein, 80 aa, Synthetic construct
SLAGWLPSIKQGFAPTLDDDKPWYSIFPIDNEDLVYGRWEDNIIWDAQAMPRLLEPPVLALDPNDENLILGWRRATRSFR

SEQ ID NO: 27669 - protein, 80 aa, Synthetic construct
SLAGWLPSIKTRFAPTLDDDKPWYSIFPIDNEDLVYGRWEDNIIWDAQAMPRLLEPPVLALDPNDENLILGWRRATRSFR

SEQ ID NO: 27670 - protein, 80 aa, Synthetic construct
SLAGWLPSIKTRNVPTLDDDKPWYSIFPIDNEDLVYGRWEDNIIWDAQAMPRLLEPPVLALDPNDENLILGWRRATRSFR

SEQ ID NO: 27671 - protein, 80 aa, Synthetic construct
SLAGWLPSIKTRNVMALDDDKPWYSIFPIDNEDLVYGRWEDNIIWDAQAMPRLLEPPVLALDPNDENLILGWRRATRSFR

SEQ ID NO: 27672 - protein, 80 aa, Synthetic construct
SLAGWLPSIKTRNVMAYNDDKPWYSIFPIDNEDLVYGRWEDNIIWDAQAMPRLLEPPVLALDPNDENLILGWRRATRSFR

SEQ ID NO: 27673 - protein, 80 aa, Synthetic construct
SLAGWLPSIKTRNVMAYNVQQGFASIFPIDNEDLVYGRWEDNIIWDAQAMPRLLEPPVLALDPNDENLILGWRRATRSFR

SEQ ID NO: 27674 - protein, 80 aa, Synthetic construct
SLAGWLPSIKTRNVMAYNVQQGFAPTFPIDNEDLVYGRWEDNIIWDAQAMPRLLEPPVLALDPNDENLILGWRRATRSFR

SEQ ID NO: 27675 - protein, 80 aa, Synthetic construct
SLAGWLPSIKTRNVMAYNVQQGFAPTLDIDNEDLVYGRWEDNIIWDAQAMPRLLEPPVLALDPNDENLILGWRRATRSFR

SEQ ID NO: 27676 - protein, 80 aa, Synthetic construct
SLAGWLPSIKTRNVMAYNVQQGFAPTLDDDNEDLVYGRWEDNIIWDAQAMPRLLEPPVLALDPNDENLILGWRRATRSFR

SEQ ID NO: 27677 - protein, 80 aa, Synthetic construct
SLAGWLPSIKTRNVMAYNVQQGFAPTLDDDKPWYSIGRWEDNIIWDAQAMPRLLEPPVLALDPNDENLILGWRRATRSFR

SEQ ID NO: 27678 - protein, 80 aa, Synthetic construct
SLAGWLPSIKTRNVMAYNVQQGFAPTLDDDKPWYSIFPWEDNIIWDAQAMPRLLEPPVLALDPNDENLILGWRRATRSFR

SEQ ID NO: 27679 - protein, 80 aa, Synthetic construct
SLAGWLPSIKTRNVMAYNVQQGFAPTLDDDKPWYSIFPIDDNIIWDAQAMPRLLEPPVLALDPNDENLILGWRRATRSFR

SEQ ID NO: 27680 - protein, 80 aa, Synthetic construct
SLAGWLPSIKTRNVMAYNVQQGFAPTLDDDKPWYSIFPIDNEIIWDAQAMPRLLEPPVLALDPNDENLILGWRRATRSFR

SEQ ID NO: 27681 - protein, 80 aa, Synthetic construct
SLAGWLPSIKTRNVMAYNVQQGFAPTLDDDKPWYSIFPIDNEDLWDAQAMPRLLEPPVLALDPNDENLILGWRRATRSFR

SEQ ID NO: 27682 - protein, 80 aa, Synthetic construct
SLAGWLPSIKTRNVMAYNVQQGFAPTLDDDKPWYSIFPIDNEDLVYAQAMPRLLEPPVLALDPNDENLILGWRRATRSFR

SEQ ID NO: 27683 - protein, 80 aa, Synthetic construct
SLAGWLPSIKTRNVMAYNVQQGFAPTLDDDKPWYSIFPIDNEDLVYGRAMPRLLEPPVLALDPNDENLILGWRRATRSFR

SEQ ID NO: 27684 - protein, 80 aa, Synthetic construct
SLAGWLPSIKTRNVMAYNVQQGFAPTLDDDKPWYSIFPIDNEDLVYGRWEPRLLEPPVLALDPNDENLILGWRRATRSFR

SEQ ID NO: 27685 - protein, 80 aa, Synthetic construct
SLAGWLPSIKTRNVMAYNVQQGFAPTLDDDKPWYSIFPIDNEDLVYGRWEDNLLEPPVLALDPNDENLILGWRRATRSFR

SEQ ID NO: 27686 - protein, 80 aa, Synthetic construct
SLAGWLPSIKTRNVMAYNVQQGFAPTLDDDKPWYSIFPIDNEDLVYGRWEDNIIEPPVLALDPNDENLILGWRRATRSFR

SEQ ID NO: 27687 - protein, 80 aa, Synthetic construct
SLAGWLPSIKTRNVMAYNVQQGFAPTLDDDKPWYSIFPIDNEDLVYGRWEDNIIWDAQAMPRPNDENLILGWRRATRSFR

SEQ ID NO: 27688 - protein, 80 aa, Synthetic construct
SLAGWLPSIKTRNVMAYNVQQGFAPTLDDDKPWYSIFPIDNEDLVYGRWEDNIIWDAQAMPRLLDENLILGWRRATRSFR

SEQ ID NO: 27689 - protein, 80 aa, Synthetic construct
SLAGWLPSIKTRNVMAYNVQQGFAPTLDDDKPWYSIFPIDNEDLVYGRWEDNIIWDAQAMPRLLEPPVLAGWRRATRSFR

SEQ ID NO: 27690 - protein, 80 aa, Synthetic construct
LFQESSSGGGAEPSFGSGLPLPPGGAGPEDPSLSVTLADIYRELYAFFGDSLATRFGTGQPAPTAPRPPGGWRRATRSFR

SEQ ID NO: 27691 - protein, 80 aa, Synthetic construct
RLDDLPSGGGAEPSFGSGLPLPPGGAGPEDPSLSVTLADIYRELYAFFGDSLATRFGTGQPAPTAPRPPGGWRRATRSFR

SEQ ID NO: 27692 - protein, 80 aa, Synthetic construct
RLDDLPWDGGAEPSFGSGLPLPPGGAGPEDPSLSVTLADIYRELYAFFGDSLATRFGTGQPAPTAPRPPGGWRRATRSFR

SEQ ID NO: 27693 - protein, 80 aa, Synthetic construct
RLDDLPWDSLAEPSFGSGLPLPPGGAGPEDPSLSVTLADIYRELYAFFGDSLATRFGTGQPAPTAPRPPGGWRRATRSFR

SEQ ID NO: 27694 - protein, 80 aa, Synthetic construct
RLDDLPWDSLLFQESSSGLPLPPGGAGPEDPSLSVTLADIYRELYAFFGDSLATRFGTGQPAPTAPRPPGGWRRATRSFR

SEQ ID NO: 27695 - protein, 80 aa, Synthetic construct
RLDDLPWDSLLFQESSSGGGLPPGGAGPEDPSLSVTLADIYRELYAFFGDSLATRFGTGQPAPTAPRPPGGWRRATRSFR

SEQ ID NO: 27696 - protein, 80 aa, Synthetic construct
RLDDLPWDSLLFQESSSGGGAEPGGAGPEDPSLSVTLADIYRELYAFFGDSLATRFGTGQPAPTAPRPPGGWRRATRSFR

SEQ ID NO: 27697 - protein, 80 aa, Synthetic construct
RLDDLPWDSLLFQESSSGGGAEPSGAGPEDPSLSVTLADIYRELYAFFGDSLATRFGTGQPAPTAPRPPGGWRRATRSFR

SEQ ID NO: 27698 - protein, 80 aa, Synthetic construct
RLDDLPWDSLLFQESSSGGGAEPSFGGPEDPSLSVTLADIYRELYAFFGDSLATRFGTGQPAPTAPRPPGGWRRATRSFR

SEQ ID NO: 27699 - protein, 80 aa, Synthetic construct
RLDDLPWDSLLFQESSSGGGAEPSFGSGEDPSLSVTLADIYRELYAFFGDSLATRFGTGQPAPTAPRPPGGWRRATRSFR

SEQ ID NO: 27700 - protein, 80 aa, Synthetic construct
RLDDLPWDSLLFQESSSGGGAEPSFGSGLPLPPGGAGPDIYRELYAFFGDSLATRFGTGQPAPTAPRPPGGWRRATRSFR

SEQ ID NO: 27701 - protein, 80 aa, Synthetic construct
RLDDLPWDSLLFQESSSGGGAEPSFGSGLPLPPGGAGPEDYRELYAFFGDSLATRFGTGQPAPTAPRPPGGWRRATRSFR

SEQ ID NO: 27702 - protein, 80 aa, Synthetic construct
RLDDLPWDSLLFQESSSGGGAEPSFGSGLPLPPGGAGPEDPSLSVTLADIYRELYAFFGQPAPTAPRPPGGWRRATRSFR

SEQ ID NO: 27703 - protein, 80 aa, Synthetic construct
RLDDLPWDSLLFQESSSGGGAEPSFGSGLPLPPGGAGPEDPSLSVTLADIYRELYAFFGDPAPTAPRPPGGWRRATRSFR

SEQ ID NO: 27704 - protein, 80 aa, Synthetic construct
RLDDLPWDSLLFQESSSGGGAEPSFGSGLPLPPGGAGPEDPSLSVTLADIYRELYAFFGDSLPTAPRPPGGWRRATRSFR

SEQ ID NO: 27705 - protein, 80 aa, Synthetic construct
RLDDLPWDSLLFQESSSGGGAEPSFGSGLPLPPGGAGPEDPSLSVTLADIYRELYAFFGDSLATAPRPPGGWRRATRSFR

SEQ ID NO: 27706 - protein, 80 aa, Synthetic construct
RLDDLPWDSLLFQESSSGGGAEPSFGSGLPLPPGGAGPEDPSLSVTLADIYRELYAFFGDSLATRFGTPGGWRRATRSFR

SEQ ID NO: 27707 - protein, 80 aa, Synthetic construct
RLDDLPWDSLLFQESSSGGGAEPSFGSGLPLPPGGAGPEDPSLSVTLADIYRELYAFFGDSLATRFGTGQGWRRATRSFR

SEQ ID NO: 27708 - protein, 80 aa, Synthetic construct
AELYSLLQEEDMYSETATAIAYEQHGFFEQAQESYEKAMDKAKKEHERSNASPAIFPEYQLWEDHWIRCSGWRRATRSFR

SEQ ID NO: 27709 - protein, 80 aa, Synthetic construct
AELYSLLQEEDMWAETATAIAYEQHGFFEQAQESYEKAMDKAKKEHERSNASPAIFPEYQLWEDHWIRCSGWRRATRSFR

SEQ ID NO: 27710 - protein, 80 aa, Synthetic construct
AELYSLLQEEDMWAGLATAIAYEQHGFFEQAQESYEKAMDKAKKEHERSNASPAIFPEYQLWEDHWIRCSGWRRATRSFR

SEQ ID NO: 27711 - protein, 80 aa, Synthetic construct
AELYSLLQEEDMWAGLWQKRAYEQHGFFEQAQESYEKAMDKAKKEHERSNASPAIFPEYQLWEDHWIRCSGWRRATRSFR

SEQ ID NO: 27712 - protein, 80 aa, Synthetic construct
AELYSLLQEEDMWAGLWQKRCKEQHGFFEQAQESYEKAMDKAKKEHERSNASPAIFPEYQLWEDHWIRCSGWRRATRSFR

SEQ ID NO: 27713 - protein, 80 aa, Synthetic construct
AELYSLLQEEDMWAGLWQKRCKYSETATAIAYEQHGFFEQAQKKEHERSNASPAIFPEYQLWEDHWIRCSGWRRATRSFR

SEQ ID NO: 27714 - protein, 80 aa, Synthetic construct
AELYSLLQEEDMWAGLWQKRCKYSETATAIAYEQHGFFEQAQESEHERSNASPAIFPEYQLWEDHWIRCSGWRRATRSFR

SEQ ID NO: 27715 - protein, 80 aa, Synthetic construct
AELYSLLQEEDMWAGLWQKRCKYSETATAIAYEQHGFFEQAQESYEKAMDKAPAIFPEYQLWEDHWIRCSGWRRATRSFR

SEQ ID NO: 27716 - protein, 80 aa, Synthetic construct
GFCSAGVQTEAGVADLTWVGERGILVASDSGAVELWELDENETLIVSKFCKYEHDDIVSTVSVLSSGTQAGWRRATRSFR

SEQ ID NO: 27717 - protein, 80 aa, Synthetic construct
FKCSAGVQTEAGVADLTWVGERGILVASDSGAVELWELDENETLIVSKFCKYEHDDIVSTVSVLSSGTQAGWRRATRSFR

SEQ ID NO: 27718 - protein, 80 aa, Synthetic construct
FKDPCAAPNEAGVADLTWVGERGILVASDSGAVELWELDENETLIVSKFCKYEHDDIVSTVSVLSSGTQAGWRRATRSFR

SEQ ID NO: 27719 - protein, 80 aa, Synthetic construct
FKDPCAAPNEGFVADLTWVGERGILVASDSGAVELWELDENETLIVSKFCKYEHDDIVSTVSVLSSGTQAGWRRATRSFR

SEQ ID NO: 27720 - protein, 80 aa, Synthetic construct
PEPTPPQMPPSQPGALIPGDPQAMSQPNRGPSPFSPVQLHQLRAQILAYKMLARGQPLPETLQLAVQGKRGWRRATRSFR

SEQ ID NO: 27721 - protein, 80 aa, Synthetic construct
PEHVPPQMPPSQPGALIPGDPQAMSQPNRGPSPFSPVQLHQLRAQILAYKMLARGQPLPETLQLAVQGKRGWRRATRSFR

SEQ ID NO: 27722 - protein, 80 aa, Synthetic construct
PEHVSSQMPPSQPGALIPGDPQAMSQPNRGPSPFSPVQLHQLRAQILAYKMLARGQPLPETLQLAVQGKRGWRRATRSFR

SEQ ID NO: 27723 - protein, 80 aa, Synthetic construct
PEHVSSPMPPSQPGALIPGDPQAMSQPNRGPSPFSPVQLHQLRAQILAYKMLARGQPLPETLQLAVQGKRGWRRATRSFR

SEQ ID NO: 27724 - protein, 80 aa, Synthetic construct
PEHVSSPMSGSQPGALIPGDPQAMSQPNRGPSPFSPVQLHQLRAQILAYKMLARGQPLPETLQLAVQGKRGWRRATRSFR

SEQ ID NO: 27725 - protein, 80 aa, Synthetic construct
PEHVSSPMSGGGPGALIPGDPQAMSQPNRGPSPFSPVQLHQLRAQILAYKMLARGQPLPETLQLAVQGKRGWRRATRSFR

SEQ ID NO: 27726 - protein, 80 aa, Synthetic construct
PEHVSSPMSGGGPTALIPGDPQAMSQPNRGPSPFSPVQLHQLRAQILAYKMLARGQPLPETLQLAVQGKRGWRRATRSFR

SEQ ID NO: 27727 - protein, 80 aa, Synthetic construct
PEHVSSPMSGGGPTPPIPGDPQAMSQPNRGPSPFSPVQLHQLRAQILAYKMLARGQPLPETLQLAVQGKRGWRRATRSFR

SEQ ID NO: 27728 - protein, 80 aa, Synthetic construct
PEHVSSPMSGGGPTPPQMGDPQAMSQPNRGPSPFSPVQLHQLRAQILAYKMLARGQPLPETLQLAVQGKRGWRRATRSFR

SEQ ID NO: 27729 - protein, 80 aa, Synthetic construct
PEHVSSPMSGGGPTPPQMPPPQAMSQPNRGPSPFSPVQLHQLRAQILAYKMLARGQPLPETLQLAVQGKRGWRRATRSFR

SEQ ID NO: 27730 - protein, 80 aa, Synthetic construct
PEHVSSPMSGGGPTPPQMPPSQAMSQPNRGPSPFSPVQLHQLRAQILAYKMLARGQPLPETLQLAVQGKRGWRRATRSFR

SEQ ID NO: 27731 - protein, 80 aa, Synthetic construct
PEHVSSPMSGGGPTPPQMPPSQPGSQPNRGPSPFSPVQLHQLRAQILAYKMLARGQPLPETLQLAVQGKRGWRRATRSFR

SEQ ID NO: 27732 - protein, 80 aa, Synthetic construct
PEHVSSPMSGGGPTPPQMPPSQPGALPNRGPSPFSPVQLHQLRAQILAYKMLARGQPLPETLQLAVQGKRGWRRATRSFR

SEQ ID NO: 27733 - protein, 80 aa, Synthetic construct
PEHVSSPMSGGGPTPPQMPPSQPGALIPRGPSPFSPVQLHQLRAQILAYKMLARGQPLPETLQLAVQGKRGWRRATRSFR

SEQ ID NO: 27734 - protein, 80 aa, Synthetic construct
PEHVSSPMSGGGPTPPQMPPSQPGALIPGDPSPFSPVQLHQLRAQILAYKMLARGQPLPETLQLAVQGKRGWRRATRSFR

SEQ ID NO: 27735 - protein, 80 aa, Synthetic construct
PEHVSSPMSGGGPTPPQMPPSQPGALIPGDPQPFSPVQLHQLRAQILAYKMLARGQPLPETLQLAVQGKRGWRRATRSFR

SEQ ID NO: 27736 - protein, 80 aa, Synthetic construct
PEHVSSPMSGGGPTPPQMPPSQPGALIPGDPQAMSPVQLHQLRAQILAYKMLARGQPLPETLQLAVQGKRGWRRATRSFR

SEQ ID NO: 27737 - protein, 80 aa, Synthetic construct
PEHVSSPMSGGGPTPPQMPPSQPGALIPGDPQAMSQVQLHQLRAQILAYKMLARGQPLPETLQLAVQGKRGWRRATRSFR

SEQ ID NO: 27738 - protein, 80 aa, Synthetic construct
PEHVSSPMSGGGPTPPQMPPSQPGALIPGDPQAMSQPNLHQLRAQILAYKMLARGQPLPETLQLAVQGKRGWRRATRSFR

SEQ ID NO: 27739 - protein, 80 aa, Synthetic construct
PEHVSSPMSGGGPTPPQMPPSQPGALIPGDPQAMSQPNRGPSPFSPVQLHQLRAQILAYKTLQLAVQGKRGWRRATRSFR

SEQ ID NO: 27740 - protein, 80 aa, Synthetic construct
PEHVSSPMSGGGPTPPQMPPSQPGALIPGDPQAMSQPNRGPSPFSPVQLHQLRAQILAYKMLQLAVQGKRGWRRATRSFR

SEQ ID NO: 27741 - protein, 80 aa, Synthetic construct
PEHVSSPMSGGGPTPPQMPPSQPGALIPGDPQAMSQPNRGPSPFSPVQLHQLRAQILAYKMLARAVQGKRGWRRATRSFR

SEQ ID NO: 27742 - protein, 80 aa, Synthetic construct
PEHVSSPMSGGGPTPPQMPPSQPGALIPGDPQAMSQPNRGPSPFSPVQLHQLRAQILAYKMLARGQQGKRGWRRATRSFR

SEQ ID NO: 27743 - protein, 80 aa, Synthetic construct
PEHVSSPMSGGGPTPPQMPPSQPGALIPGDPQAMSQPNRGPSPFSPVQLHQLRAQILAYKMLARGQPLKRGWRRATRSFR

SEQ ID NO: 27744 - protein, 80 aa, Synthetic construct
PEHVSSPMSGGGPTPPQMPPSQPGALIPGDPQAMSQPNRGPSPFSPVQLHQLRAQILAYKMLARGQPLPEGWRRATRSFR

SEQ ID NO: 27745 - protein, 80 aa, Synthetic construct
PSPFSPVQLHQLRAQILAYKMLARGQPLPETLQLAVQGKRTLPGLQQQQQQQQQQQQQQQQQQQQQQQPQGWRRATRSFR

SEQ ID NO: 27746 - protein, 80 aa, Synthetic construct
PQPFSPVQLHQLRAQILAYKMLARGQPLPETLQLAVQGKRTLPGLQQQQQQQQQQQQQQQQQQQQQQQPQGWRRATRSFR

SEQ ID NO: 27747 - protein, 80 aa, Synthetic construct
PQAMSPVQLHQLRAQILAYKMLARGQPLPETLQLAVQGKRTLPGLQQQQQQQQQQQQQQQQQQQQQQQPQGWRRATRSFR

SEQ ID NO: 27748 - protein, 80 aa, Synthetic construct
PQAMSQVQLHQLRAQILAYKMLARGQPLPETLQLAVQGKRTLPGLQQQQQQQQQQQQQQQQQQQQQQQPQGWRRATRSFR

SEQ ID NO: 27749 - protein, 80 aa, Synthetic construct
PQAMSQPNLHQLRAQILAYKMLARGQPLPETLQLAVQGKRTLPGLQQQQQQQQQQQQQQQQQQQQQQQPQGWRRATRSFR

SEQ ID NO: 27750 - protein, 80 aa, Synthetic construct
PQAMSQPNRGPSPFSPVQLHQLRAQILAYKTLQLAVQGKRTLPGLQQQQQQQQQQQQQQQQQQQQQQQPQGWRRATRSFR

SEQ ID NO: 27751 - protein, 80 aa, Synthetic construct
PQAMSQPNRGPSPFSPVQLHQLRAQILAYKMLARAVQGKRTLPGLQQQQQQQQQQQQQQQQQQQQQQQPQGWRRATRSFR

SEQ ID NO: 27752 - protein, 80 aa, Synthetic construct
PQAMSQPNRGPSPFSPVQLHQLRAQILAYKMLARGQQGKRTLPGLQQQQQQQQQQQQQQQQQQQQQQQPQGWRRATRSFR

SEQ ID NO: 27753 - protein, 80 aa, Synthetic construct
PQAMSQPNRGPSPFSPVQLHQLRAQILAYKMLARGQPLKRTLPGLQQQQQQQQQQQQQQQQQQQQQQQPQGWRRATRSFR

SEQ ID NO: 27754 - protein, 80 aa, Synthetic construct
PQAMSQPNRGPSPFSPVQLHQLRAQILAYKMLARGQPLPETLPGLQQQQQQQQQQQQQQQQQQQQQQQPQGWRRATRSFR

SEQ ID NO: 27755 - protein, 80 aa, Synthetic construct
PQAMSQPNRGPSPFSPVQLHQLRAQILAYKMLARGQPLPETLQLLQQQQQQQQQQQQQQQQQQQQQQQPQGWRRATRSFR

SEQ ID NO: 27756 - protein, 80 aa, Synthetic construct
PQAMSQPNRGPSPFSPVQLHQLRAQILAYKMLARGQPLPETLQLAVQQQQQQQQQQQQQQQQQQQQQQPQGWRRATRSFR

SEQ ID NO: 27757 - protein, 80 aa, Synthetic construct
PQAMSQPNRGPSPFSPVQLHQLRAQILAYKMLARGQPLPETLQLAVQGQQQQQQQQQQQQQQQQQQQQPQGWRRATRSFR

SEQ ID NO: 27758 - protein, 80 aa, Synthetic construct
PQAMSQPNRGPSPFSPVQLHQLRAQILAYKMLARGQPLPETLQLAVQGKRQQQQQQQQQQQQQQQQQQPQGWRRATRSFR

SEQ ID NO: 27759 - protein, 80 aa, Synthetic construct
PQAMSQPNRGPSPFSPVQLHQLRAQILAYKMLARGQPLPETLQLAVQGKRTLQQQQQQQQQQQQQQQQPQGWRRATRSFR

SEQ ID NO: 27760 - protein, 80 aa, Synthetic construct
PQAMSQPNRGPSPFSPVQLHQLRAQILAYKMLARGQPLPETLQLAVQGKRTLPGQQQQQQQQQQQQQQPQGWRRATRSFR

SEQ ID NO: 27761 - protein, 80 aa, Synthetic construct
PQAMSQPNRGPSPFSPVQLHQLRAQILAYKMLARGQPLPETLQLAVQGKRTLPGLQQQQQQQQQQQQQPQGWRRATRSFR

SEQ ID NO: 27762 - protein, 80 aa, Synthetic construct
PQAMSQPNRGPSPFSPVQLHQLRAQILAYKMLARGQPLPETLQLAVQGKRTLPGLQQQQQQQQQQQQQQQGWRRATRSFR

SEQ ID NO: 27763 - protein, 80 aa, Synthetic construct
EQSEWQPTNVDGKGYLLNEPGVQPTSVYGDFSCKEEPEIDSPGGDIGLSLQRVFTDLKNMDATWLDSLLTGWRRATRSFR

SEQ ID NO: 27764 - protein, 80 aa, Synthetic construct
KLSEWQPTNVDGKGYLLNEPGVQPTSVYGDFSCKEEPEIDSPGGDIGLSLQRVFTDLKNMDATWLDSLLTGWRRATRSFR

SEQ ID NO: 27765 - protein, 80 aa, Synthetic construct
KLPEWQPTNVDGKGYLLNEPGVQPTSVYGDFSCKEEPEIDSPGGDIGLSLQRVFTDLKNMDATWLDSLLTGWRRATRSFR

SEQ ID NO: 27766 - protein, 80 aa, Synthetic construct
KLPEDIPTNVDGKGYLLNEPGVQPTSVYGDFSCKEEPEIDSPGGDIGLSLQRVFTDLKNMDATWLDSLLTGWRRATRSFR

SEQ ID NO: 27767 - protein, 80 aa, Synthetic construct
KLPEDIMKNVDGKGYLLNEPGVQPTSVYGDFSCKEEPEIDSPGGDIGLSLQRVFTDLKNMDATWLDSLLTGWRRATRSFR

SEQ ID NO: 27768 - protein, 80 aa, Synthetic construct
KLPEDIMKLLDGKGYLLNEPGVQPTSVYGDFSCKEEPEIDSPGGDIGLSLQRVFTDLKNMDATWLDSLLTGWRRATRSFR

SEQ ID NO: 27769 - protein, 80 aa, Synthetic construct
KLPEDIMKLLEQKGYLLNEPGVQPTSVYGDFSCKEEPEIDSPGGDIGLSLQRVFTDLKNMDATWLDSLLTGWRRATRSFR

SEQ ID NO: 27770 - protein, 80 aa, Synthetic construct
KLPEDIMKLLEQSEYLLNEPGVQPTSVYGDFSCKEEPEIDSPGGDIGLSLQRVFTDLKNMDATWLDSLLTGWRRATRSFR

SEQ ID NO: 27771 - protein, 80 aa, Synthetic construct
KLPEDIMKLLEQSEWQLNEPGVQPTSVYGDFSCKEEPEIDSPGGDIGLSLQRVFTDLKNMDATWLDSLLTGWRRATRSFR

SEQ ID NO: 27772 - protein, 80 aa, Synthetic construct
KLPEDIMKLLEQSEWQPTEPGVQPTSVYGDFSCKEEPEIDSPGGDIGLSLQRVFTDLKNMDATWLDSLLTGWRRATRSFR

SEQ ID NO: 27773 - protein, 80 aa, Synthetic construct
KLPEDIMKLLEQSEWQPTNVGVQPTSVYGDFSCKEEPEIDSPGGDIGLSLQRVFTDLKNMDATWLDSLLTGWRRATRSFR

SEQ ID NO: 27774 - protein, 80 aa, Synthetic construct
KLPEDIMKLLEQSEWQPTNVDGQPTSVYGDFSCKEEPEIDSPGGDIGLSLQRVFTDLKNMDATWLDSLLTGWRRATRSFR

SEQ ID NO: 27775 - protein, 80 aa, Synthetic construct
KLPEDIMKLLEQSEWQPTNVDGKGTSVYGDFSCKEEPEIDSPGGDIGLSLQRVFTDLKNMDATWLDSLLTGWRRATRSFR

SEQ ID NO: 27776 - protein, 80 aa, Synthetic construct
KLPEDIMKLLEQSEWQPTNVDGKGYLVYGDFSCKEEPEIDSPGGDIGLSLQRVFTDLKNMDATWLDSLLTGWRRATRSFR

SEQ ID NO: 27777 - protein, 80 aa, Synthetic construct
KLPEDIMKLLEQSEWQPTNVDGKGYLLNGDFSCKEEPEIDSPGGDIGLSLQRVFTDLKNMDATWLDSLLTGWRRATRSFR

SEQ ID NO: 27778 - protein, 80 aa, Synthetic construct
KLPEDIMKLLEQSEWQPTNVDGKGYLLNEPGVQPTSVYGDFSCKEEPEIDSPVFTDLKNMDATWLDSLLTGWRRATRSFR

SEQ ID NO: 27779 - protein, 80 aa, Synthetic construct
KLPEDIMKLLEQSEWQPTNVDGKGYLLNEPGVQPTSVYGDFSCKEEPEIDSPGGDILKNMDATWLDSLLTGWRRATRSFR

SEQ ID NO: 27780 - protein, 80 aa, Synthetic construct
KLPEDIMKLLEQSEWQPTNVDGKGYLLNEPGVQPTSVYGDFSCKEEPEIDSPGGDIGLNMDATWLDSLLTGWRRATRSFR

SEQ ID NO: 27781 - protein, 80 aa, Synthetic construct
KLPEDIMKLLEQSEWQPTNVDGKGYLLNEPGVQPTSVYGDFSCKEEPEIDSPGGDIGLSLQRVFTDLKNMGWRRATRSFR

SEQ ID NO: 27782 - protein, 80 aa, Synthetic construct
CYSNYPFPLTSWSEPFYQQLPLEPPAAKTGCPPLWPNPAGNLYEEKVHVDFNSYVQSPAYHSPQEDPFLFGWRRATRSFR

SEQ ID NO: 27783 - protein, 80 aa, Synthetic construct
CYSNYPFPLTSWPCPFYQQLPLEPPAAKTGCPPLWPNPAGNLYEEKVHVDFNSYVQSPAYHSPQEDPFLFGWRRATRSFR

SEQ ID NO: 27784 - protein, 80 aa, Synthetic construct
CYSNYPFPLTSWPCSFYQQLPLEPPAAKTGCPPLWPNPAGNLYEEKVHVDFNSYVQSPAYHSPQEDPFLFGWRRATRSFR

SEQ ID NO: 27785 - protein, 80 aa, Synthetic construct
CYSNYPFPLTSWPCSFSPQLPLEPPAAKTGCPPLWPNPAGNLYEEKVHVDFNSYVQSPAYHSPQEDPFLFGWRRATRSFR

SEQ ID NO: 27786 - protein, 80 aa, Synthetic construct
CYSNYPFPLTSWPCSFSPSQNSSEPFAKTGCPPLWPNPAGNLYEEKVHVDFNSYVQSPAYHSPQEDPFLFGWRRATRSFR

SEQ ID NO: 27787 - protein, 80 aa, Synthetic construct
CYSNYPFPLTSWPCSFSPSQNSSEPFYQTGCPPLWPNPAGNLYEEKVHVDFNSYVQSPAYHSPQEDPFLFGWRRATRSFR

SEQ ID NO: 27788 - protein, 80 aa, Synthetic construct
CYSNYPFPLTSWPCSFSPSQNSSEPFYQQLCPPLWPNPAGNLYEEKVHVDFNSYVQSPAYHSPQEDPFLFGWRRATRSFR

SEQ ID NO: 27789 - protein, 80 aa, Synthetic construct
CYSNYPFPLTSWPCSFSPSQNSSEPFYQQLPLPLWPNPAGNLYEEKVHVDFNSYVQSPAYHSPQEDPFLFGWRRATRSFR

SEQ ID NO: 27790 - protein, 80 aa, Synthetic construct
CYSNYPFPLTSWPCSFSPSQNSSEPFYQQLPLEPWPNPAGNLYEEKVHVDFNSYVQSPAYHSPQEDPFLFGWRRATRSFR

SEQ ID NO: 27791 - protein, 80 aa, Synthetic construct
CYSNYPFPLTSWPCSFSPSQNSSEPFYQQLPLEPPAAKTGNLYEEKVHVDFNSYVQSPAYHSPQEDPFLFGWRRATRSFR

SEQ ID NO: 27792 - protein, 80 aa, Synthetic construct
CYSNYPFPLTSWPCSFSPSQNSSEPFYQQLPLEPPAAKTGCPPLWPVHVDFNSYVQSPAYHSPQEDPFLFGWRRATRSFR

SEQ ID NO: 27793 - protein, 80 aa, Synthetic construct
CYSNYPFPLTSWPCSFSPSQNSSEPFYQQLPLEPPAAKTGCPPLWPNPAGNLYEEKVHVDFNSYEDPFLFGWRRATRSFR

SEQ ID NO: 27794 - protein, 80 aa, Synthetic construct
CYSNYPFPLTSWPCSFSPSQNSSEPFYQQLPLEPPAAKTGCPPLWPNPAGNLYEEKVHVDFNSYVQPFLFGWRRATRSFR

SEQ ID NO: 27795 - protein, 80 aa, Synthetic construct
NFETSRCATLQYCPDPYIQRFVSYYRSTMSQSTQTNEFLSPEVFQHIWDFLEQPICSVQPIDLNFVDEPSGWRRATRSFR

SEQ ID NO: 27796 - protein, 80 aa, Synthetic construct
NFETSRCATLQYCPDPYIQRFVETYRSTMSQSTQTNEFLSPEVFQHIWDFLEQPICSVQPIDLNFVDEPSGWRRATRSFR

SEQ ID NO: 27797 - protein, 80 aa, Synthetic construct
NFETSRCATLQYCPDPYIQRFVETPAHFSWQSTQTNEFLSPEVFQHIWDFLEQPICSVQPIDLNFVDEPSGWRRATRSFR

SEQ ID NO: 27798 - protein, 80 aa, Synthetic construct
NFETSRCATLQYCPDPYIQRFVETPAHFSWKESYTNEFLSPEVFQHIWDFLEQPICSVQPIDLNFVDEPSGWRRATRSFR

SEQ ID NO: 27799 - protein, 80 aa, Synthetic construct
NFETSRCATLQYCPDPYIQRFVETPAHFSWKESYYRSTLSPEVFQHIWDFLEQPICSVQPIDLNFVDEPSGWRRATRSFR

SEQ ID NO: 27800 - protein, 80 aa, Synthetic construct
NFETSRCATLQYCPDPYIQRFVETPAHFSWKESYYRSTMSPEVFQHIWDFLEQPICSVQPIDLNFVDEPSGWRRATRSFR

SEQ ID NO: 27801 - protein, 80 aa, Synthetic construct
NFETSRCATLQYCPDPYIQRFVETPAHFSWKESYYRSTMSQSTQQHIWDFLEQPICSVQPIDLNFVDEPSGWRRATRSFR

SEQ ID NO: 27802 - protein, 80 aa, Synthetic construct
NFETSRCATLQYCPDPYIQRFVETPAHFSWKESYYRSTMSQSTQTNEFLSPEVFICSVQPIDLNFVDEPSGWRRATRSFR

SEQ ID NO: 27803 - protein, 80 aa, Synthetic construct
NFETSRCATLQYCPDPYIQRFVETPAHFSWKESYYRSTMSQSTQTNEFLSPEVFQHIWDFIDLNFVDEPSGWRRATRSFR

SEQ ID NO: 27804 - protein, 80 aa, Synthetic construct
NFETSRCATLQYCPDPYIQRFVETPAHFSWKESYYRSTMSQSTQTNEFLSPEVFQHIWDFLEQPICSVPSGWRRATRSFR

SEQ ID NO: 27805 - protein, 80 aa, Synthetic construct
QSTQTNEFLSPEVFQHIWDFIDLNFVDEPSEDGATNKIEISMDCIRMQDSDLSDPMWPQYTNLGLLNSMDGWRRATRSFR

SEQ ID NO: 27806 - protein, 80 aa, Synthetic construct
QSTQTNEFLSPEVFQHIWDFLELNFVDEPSEDGATNKIEISMDCIRMQDSDLSDPMWPQYTNLGLLNSMDGWRRATRSFR

SEQ ID NO: 27807 - protein, 80 aa, Synthetic construct
QSTQTNEFLSPEVFQHIWDFLEQPICSVQPIDLNFVDEEISMDCIRMQDSDLSDPMWPQYTNLGLLNSMDGWRRATRSFR

SEQ ID NO: 27808 - protein, 80 aa, Synthetic construct
QSTQTNEFLSPEVFQHIWDFLEQPICSVQPIDLNFVDEPSEDDCIRMQDSDLSDPMWPQYTNLGLLNSMDGWRRATRSFR

SEQ ID NO: 27809 - protein, 80 aa, Synthetic construct
QSTQTNEFLSPEVFQHIWDFLEQPICSVQPIDLNFVDEPSEDGATNKIEISMDCIRWPQYTNLGLLNSMDGWRRATRSFR

SEQ ID NO: 27810 - protein, 80 aa, Synthetic construct
IWDKLEYMDLDEFLLENGIPASPTHLAHNLLLPVAELEGKESASSSTASPPSSSTAIFQPSETVSSTESSGWRRATRSFR

SEQ ID NO: 27811 - protein, 80 aa, Synthetic construct
IWDKTIYMDLDEFLLENGIPASPTHLAHNLLLPVAELEGKESASSSTASPPSSSTAIFQPSETVSSTESSGWRRATRSFR

SEQ ID NO: 27812 - protein, 80 aa, Synthetic construct
IWDKTIPYDGESFHLEYMDLDEFLLENGIPASPTHLAHNLLLASSSTASPPSSSTAIFQPSETVSSTESSGWRRATRSFR

SEQ ID NO: 27813 - protein, 80 aa, Synthetic construct
IWDKTIPYDGESFHLEYMDLDEFLLENGIPASPTHLAHNLLLPVSSTASPPSSSTAIFQPSETVSSTESSGWRRATRSFR

SEQ ID NO: 27814 - protein, 80 aa, Synthetic construct
IWDKTIPYDGESFHLEYMDLDEFLLENGIPASPTHLAHNLLLPVAETASPPSSSTAIFQPSETVSSTESSGWRRATRSFR

SEQ ID NO: 27815 - protein, 80 aa, Synthetic construct
IWDKTIPYDGESFHLEYMDLDEFLLENGIPASPTHLAHNLLLPVAELESPPSSSTAIFQPSETVSSTESSGWRRATRSFR

SEQ ID NO: 27816 - protein, 80 aa, Synthetic construct
IWDKTIPYDGESFHLEYMDLDEFLLENGIPASPTHLAHNLLLPVAELEGKPSSSTAIFQPSETVSSTESSGWRRATRSFR

SEQ ID NO: 27817 - protein, 80 aa, Synthetic construct
IWDKTIPYDGESFHLEYMDLDEFLLENGIPASPTHLAHNLLLPVAELEGKESSSTAIFQPSETVSSTESSGWRRATRSFR

SEQ ID NO: 27818 - protein, 80 aa, Synthetic construct
IWDKTIPYDGESFHLEYMDLDEFLLENGIPASPTHLAHNLLLPVAELEGKESASTAIFQPSETVSSTESSGWRRATRSFR

SEQ ID NO: 27819 - protein, 80 aa, Synthetic construct
IWDKTIPYDGESFHLEYMDLDEFLLENGIPASPTHLAHNLLLPVAELEGKESASSSIFQPSETVSSTESSGWRRATRSFR

SEQ ID NO: 27820 - protein, 80 aa, Synthetic construct
IWDKTIPYDGESFHLEYMDLDEFLLENGIPASPTHLAHNLLLPVAELEGKESASSSTAQPSETVSSTESSGWRRATRSFR

SEQ ID NO: 27821 - protein, 80 aa, Synthetic construct
IWDKTIPYDGESFHLEYMDLDEFLLENGIPASPTHLAHNLLLPVAELEGKESASSSTASPSETVSSTESSGWRRATRSFR

SEQ ID NO: 27822 - protein, 80 aa, Synthetic construct
IWDKTIPYDGESFHLEYMDLDEFLLENGIPASPTHLAHNLLLPVAELEGKESASSSTASPPSTVSSTESSGWRRATRSFR

SEQ ID NO: 27823 - protein, 80 aa, Synthetic construct
IWDKTIPYDGESFHLEYMDLDEFLLENGIPASPTHLAHNLLLPVAELEGKESASSSTASPPSSSSSTESSGWRRATRSFR

SEQ ID NO: 27824 - protein, 80 aa, Synthetic construct
IWDKTIPYDGESFHLEYMDLDEFLLENGIPASPTHLAHNLLLPVAELEGKESASSSTASPPSSSTATESSGWRRATRSFR

SEQ ID NO: 27825 - protein, 80 aa, Synthetic construct
IWDKTIPYDGESFHLEYMDLDEFLLENGIPASPTHLAHNLLLPVAELEGKESASSSTASPPSSSTAIFSSGWRRATRSFR

SEQ ID NO: 27826 - protein, 80 aa, Synthetic construct
IWDKTIPYDGESFHLEYMDLDEFLLENGIPASPTHLAHNLLLPVAELEGKESASSSTASPPSSSTAIFQPGWRRATRSFR

SEQ ID NO: 27827 - protein, 80 aa, Synthetic construct
PPLHALPDLSPSPLPHPAMGRAPVDFINISDPSIMDFALQGNLWEEMKDEGFSLDTLGAFADSPLGCDLGGWRRATRSFR

SEQ ID NO: 27828 - protein, 80 aa, Synthetic construct
PPLHALPDLSPSPLPHPAMGRAPVDFINISTDMNTEVDALDPSIMDFALQGNLWEEMKDEGFSLLGCDLGGWRRATRSFR

SEQ ID NO: 27829 - protein, 80 aa, Synthetic construct
RAPVDFINALDPSIMDFALQGNLWEEMKDEGFSLDTLGAFADSPLGCDLGASGLTPASGGSDQSFPDLQVGWRRATRSFR

SEQ ID NO: 27830 - protein, 80 aa, Synthetic construct
RAPVDFINISDPSIMDFALQGNLWEEMKDEGFSLDTLGAFADSPLGCDLGASGLTPASGGSDQSFPDLQVGWRRATRSFR

SEQ ID NO: 27831 - protein, 80 aa, Synthetic construct
RAPVDFINISTDMNTEVDALDPSIMDFALQGNLWEEMKDEGFSPLGCDLGASGLTPASGGSDQSFPDLQVGWRRATRSFR

SEQ ID NO: 27832 - protein, 80 aa, Synthetic construct
RAPVDFINISTDMNTEVDALDPSIMDFALQGNLWEEMKDEGFSLDTLGAFADSPLGCDLGASGLFPDLQVGWRRATRSFR

SEQ ID NO: 27833 - protein, 80 aa, Synthetic construct
TDMNTEVDALDPSIMDFALQGNLWEEMKDEGFSLDTLGAFADSPLGCDLGASGLFPDLQVTGLYTAYSTPGWRRATRSFR

SEQ ID NO: 27834 - protein, 80 aa, Synthetic construct
PRCSPQFPLYYENFFHPQGVPSPQRPSFEGGGEYGATPNPYLWFNGPTMTPPPYLPGPNASPFLPQAYGVGWRRATRSFR

SEQ ID NO: 27835 - protein, 80 aa, Synthetic construct
PRCSPQFPSIGQEPPEMNLYYENFFHSFEGGGEYGATPNPYLWFNGPTMTPPPYLPGPNASPFLPQAYGVGWRRATRSFR

SEQ ID NO: 27836 - protein, 80 aa, Synthetic construct
PRCSPQFPSIGQEPPEMNLYYENFFHPQGVGGEYGATPNPYLWFNGPTMTPPPYLPGPNASPFLPQAYGVGWRRATRSFR

SEQ ID NO: 27837 - protein, 80 aa, Synthetic construct
PRCSPQFPSIGQEPPEMNLYYENFFHPQGVPSEYGATPNPYLWFNGPTMTPPPYLPGPNASPFLPQAYGVGWRRATRSFR

SEQ ID NO: 27838 - protein, 80 aa, Synthetic construct
PRCSPQFPSIGQEPPEMNLYYENFFHPQGVPSPQRPSFNPYLWFNGPTMTPPPYLPGPNASPFLPQAYGVGWRRATRSFR

SEQ ID NO: 27839 - protein, 80 aa, Synthetic construct
PRCSPQFPSIGQEPPEMNLYYENFFHPQGVPSPQRPSFEGYLWFNGPTMTPPPYLPGPNASPFLPQAYGVGWRRATRSFR

SEQ ID NO: 27840 - protein, 80 aa, Synthetic construct
PRCSPQFPSIGQEPPEMNLYYENFFHPQGVPSPQRPSFEGGGEYGATPNPYLWFLPGPNASPFLPQAYGVGWRRATRSFR

SEQ ID NO: 27841 - protein, 80 aa, Synthetic construct
MFDLSLNFSQSAHSASEQQLGGGAAAGNLSLSLVSLGSHFEFPDYCTPELSEMIAGDWLEANFSDLVFTYGWRRATRSFR

SEQ ID NO: 27842 - protein, 80 aa, Synthetic construct
MFDLSLNFSQSAHSASEQQLGGGAAAGNLSLSLVDKDLHFEFPDYCTPELSEMIAGDWLEANFSDLVFTYGWRRATRSFR

SEQ ID NO: 27843 - protein, 80 aa, Synthetic construct
MFDLSLNFSQSAHSASEQQLGGGAAAGNLSLSLVDKDLDSEFPDYCTPELSEMIAGDWLEANFSDLVFTYGWRRATRSFR

SEQ ID NO: 27844 - protein, 80 aa, Synthetic construct
MFDLSLNFSQSAHSASEQQLGGGAAAGNLSLSLVDKDLDSFSPDYCTPELSEMIAGDWLEANFSDLVFTYGWRRATRSFR

SEQ ID NO: 27845 - protein, 80 aa, Synthetic construct
MFDLSLNFSQSAHSASEQQLGGGAAAGNLSLSLVDKDLDSFSEGYCTPELSEMIAGDWLEANFSDLVFTYGWRRATRSFR

SEQ ID NO: 27846 - protein, 80 aa, Synthetic construct
MFDLSLNFSQSAHSASEQQLGGGAAAGNLSLSLVDKDLDSFSEGSLTPELSEMIAGDWLEANFSDLVFTYGWRRATRSFR

SEQ ID NO: 27847 - protein, 80 aa, Synthetic construct
MFDLSLNFSQSAHSASEQQLGGGAAAGNLSLSLVDKDLDSFSEGSLGSELSEMIAGDWLEANFSDLVFTYGWRRATRSFR

SEQ ID NO: 27848 - protein, 80 aa, Synthetic construct
TLSDSLSGSSLYSTSANLPVMGHEKFPSDLDLMESIIRSELMDADGLDFNFDSLISTQNVVGLNVGNFTGGWRRATRSFR

SEQ ID NO: 27849 - protein, 80 aa, Synthetic construct
TLSDSLSGSSLYSTSANLPVMGHEKFPSDLDLDMSIIRSELMDADGLDFNFDSLISTQNVVGLNVGNFTGGWRRATRSFR

SEQ ID NO: 27850 - protein, 80 aa, Synthetic construct
TLSDSLSGSSLYSTSANLPVMGHEKFPSDLDLDMFNIRSELMDADGLDFNFDSLISTQNVVGLNVGNFTGGWRRATRSFR

SEQ ID NO: 27851 - protein, 80 aa, Synthetic construct
TLSDSLSGSSLYSTSANLPVMGHEKFPSDLDLDMFNGSLELMDADGLDFNFDSLISTQNVVGLNVGNFTGGWRRATRSFR

SEQ ID NO: 27852 - protein, 80 aa, Synthetic construct
TLSDSLSGSSLYSTSANLPVMGHEKFPSDLDLDMFNGSLECDMESILDFNFDSLISTQNVVGLNVGNFTGGWRRATRSFR

SEQ ID NO: 27853 - protein, 80 aa, Synthetic construct
TLSDSLSGSSLYSTSANLPVMGHEKFPSDLDLDMFNGSLECDMESIIRFNFDSLISTQNVVGLNVGNFTGGWRRATRSFR

SEQ ID NO: 27854 - protein, 80 aa, Synthetic construct
TLSDSLSGSSLYSTSANLPVMGHEKFPSDLDLDMFNGSLECDMESIIRSELMSLISTQNVVGLNVGNFTGGWRRATRSFR

SEQ ID NO: 27855 - protein, 80 aa, Synthetic construct
LYSTSANLPVMGHEKFPSDLDLMESIIRSELMDADGLDFNFDSLISTQNVVGLNVGNFTGAKQASSQSWVGWRRATRSFR

SEQ ID NO: 27856 - protein, 80 aa, Synthetic construct
LYSTSANLPVMGHEKFPSDLDLDMSIIRSELMDADGLDFNFDSLISTQNVVGLNVGNFTGAKQASSQSWVGWRRATRSFR

SEQ ID NO: 27857 - protein, 80 aa, Synthetic construct
LYSTSANLPVMGHEKFPSDLDLDMFNGSLECDMESILDFNFDSLISTQNVVGLNVGNFTGAKQASSQSWVGWRRATRSFR

SEQ ID NO: 27858 - protein, 80 aa, Synthetic construct
LYSTSANLPVMGHEKFPSDLDLDMFNGSLECDMESIIRFNFDSLISTQNVVGLNVGNFTGAKQASSQSWVGWRRATRSFR

SEQ ID NO: 27859 - protein, 80 aa, Synthetic construct
LYSTSANLPVMGHEKFPSDLDLDMFNGSLECDMESIIRSELMDADGLDFNFDSLISTQNVVGLNVGNFWVGWRRATRSFR

SEQ ID NO: 27860 - protein, 80 aa, Synthetic construct
STSANLPVMGHEKFPSDLDLDMFNGSLECDMESIIRFNFDSLISTQNVVGLNVGNFTGAKQASSQSWVPGGWRRATRSFR

SEQ ID NO: 27861 - protein, 80 aa, Synthetic construct
DLGTAPDEAVRAPLDWALPLSEVPSDWEVDDLLCSLLSPPASLNILSSSNPCLVHHDHTYSLPRETVSMDGWRRATRSFR

SEQ ID NO: 27862 - protein, 80 aa, Synthetic construct
LLGTAPDEAVRAPLDWALPLSEVPSDWEVDDLLCSLLSPPASLNILSSSNPCLVHHDHTYSLPRETVSMDGWRRATRSFR

SEQ ID NO: 27863 - protein, 80 aa, Synthetic construct
LLAFAPDEAVRAPLDWALPLSEVPSDWEVDDLLCSLLSPPASLNILSSSNPCLVHHDHTYSLPRETVSMDGWRRATRSFR

SEQ ID NO: 27864 - protein, 80 aa, Synthetic construct
LLAFLLEESGDLGTAPDEAVRAVPSDWEVDDLLCSLLSPPASLNILSSSNPCLVHHDHTYSLPRETVSMDGWRRATRSFR

SEQ ID NO: 27865 - protein, 80 aa, Synthetic construct
LLAFLLEESGDLGTAPDEAVRAPLDWALPLSEVPSDWEPPASLNILSSSNPCLVHHDHTYSLPRETVSMDGWRRATRSFR

SEQ ID NO: 27866 - protein, 80 aa, Synthetic construct
LLAFLLEESGDLGTAPDEAVRAPLDWALPLSEVPSDWEVDASLNILSSSNPCLVHHDHTYSLPRETVSMDGWRRATRSFR

SEQ ID NO: 27867 - protein, 80 aa, Synthetic construct
LLAFLLEESGDLGTAPDEAVRAPLDWALPLSEVPSDWEVDDLLNILSSSNPCLVHHDHTYSLPRETVSMDGWRRATRSFR

SEQ ID NO: 27868 - protein, 80 aa, Synthetic construct
LLAFLLEESGDLGTAPDEAVRAPLDWALPLSEVPSDWEVDDLLCILSSSNPCLVHHDHTYSLPRETVSMDGWRRATRSFR

SEQ ID NO: 27869 - protein, 80 aa, Synthetic construct
LLAFLLEESGDLGTAPDEAVRAPLDWALPLSEVPSDWEVDDLLCSLSSSNPCLVHHDHTYSLPRETVSMDGWRRATRSFR

SEQ ID NO: 27870 - protein, 80 aa, Synthetic construct
LLAFLLEESGDLGTAPDEAVRAPLDWALPLSEVPSDWEVDDLLCSLLSSNPCLVHHDHTYSLPRETVSMDGWRRATRSFR

SEQ ID NO: 27871 - protein, 80 aa, Synthetic construct
LLAFLLEESGDLGTAPDEAVRAPLDWALPLSEVPSDWEVDDLLCSLLSPPASLVHHDHTYSLPRETVSMDGWRRATRSFR

SEQ ID NO: 27872 - protein, 80 aa, Synthetic construct
HPAAGSNCYMQSTDYYAYFEQAVPSNNIYMEQAWAVNQPYTCSYPGNMFKSKDSDLDMALNQYSQPEYFTGWRRATRSFR

SEQ ID NO: 27873 - protein, 80 aa, Synthetic construct
HPAAGSNCYMQSTDYYAYFEDSVPSNNIYMEQAWAVNQPYTCSYPGNMFKSKDSDLDMALNQYSQPEYFTGWRRATRSFR

SEQ ID NO: 27874 - protein, 80 aa, Synthetic construct
HPAAGSNCYMQSTDYYAYFEDSPGSNNIYMEQAWAVNQPYTCSYPGNMFKSKDSDLDMALNQYSQPEYFTGWRRATRSFR

SEQ ID NO: 27875 - protein, 80 aa, Synthetic construct
HPAAGSNCYMQSTDYYAYFEDSPGYSNIYMEQAWAVNQPYTCSYPGNMFKSKDSDLDMALNQYSQPEYFTGWRRATRSFR

SEQ ID NO: 27876 - protein, 80 aa, Synthetic construct
HPAAGSNCYMQSTDYYAYFEDSPGYSGCYMEQAWAVNQPYTCSYPGNMFKSKDSDLDMALNQYSQPEYFTGWRRATRSFR

SEQ ID NO: 27877 - protein, 80 aa, Synthetic construct
HPAAGSNCYMQSTDYYAYFEDSPGYSGCDAQAVPSNNIYMEQAWAVNQPYTCSYDLDMALNQYSQPEYFTGWRRATRSFR

SEQ ID NO: 27878 - protein, 80 aa, Synthetic construct
HPAAGSNCYMQSTDYYAYFEDSPGYSGCDAQAVPSNNIYMEQAWAVNQPYTCSYPGDMALNQYSQPEYFTGWRRATRSFR

SEQ ID NO: 27879 - protein, 80 aa, Synthetic construct
HPAAGSNCYMQSTDYYAYFEDSPGYSGCDAQAVPSNNIYMEQAWAVNQPYTCSYPGNMFKNQYSQPEYFTGWRRATRSFR

SEQ ID NO: 27880 - protein, 80 aa, Synthetic construct
GEPAGVAGTMESPFSPGLFHFAELGYFTDTDELQLEAANETYENNFDNLDFDLDLMPWESDIWDINNQICGWRRATRSFR

SEQ ID NO: 27881 - protein, 80 aa, Synthetic construct
RLDEDWDSALFAELGYFTDTDELQLEAANETYENNFDNLDFDLDLMPWESDIWDINNQICTVKDIKAEPQGWRRATRSFR

SEQ ID NO: 27882 - protein, 80 aa, Synthetic construct
ESPFDWDSALFAELGYFTDTDELQLEAANETYENNFDNLDFDLDLMPWESDIWDINNQICTVKDIKAEPQGWRRATRSFR

SEQ ID NO: 27883 - protein, 80 aa, Synthetic construct
ESPFSPGLFHRLELGYFTDTDELQLEAANETYENNFDNLDFDLDLMPWESDIWDINNQICTVKDIKAEPQGWRRATRSFR

SEQ ID NO: 27884 - protein, 80 aa, Synthetic construct
ESPFSPGLFHRLDEDWDSALFAELGYAANETYENNFDNLDFDLDLMPWESDIWDINNQICTVKDIKAEPQGWRRATRSFR

SEQ ID NO: 27885 - protein, 80 aa, Synthetic construct
PGPSSLVPTLSMIAPPPVMASAPIPKTEAASQDRMPQDLDLDMYMENLECDMDNIISDLMDEGEGLDFNFGWRRATRSFR

SEQ ID NO: 27886 - protein, 80 aa, Synthetic construct
PGPSSLVPTLSMIAPPPVMASAPIPKALGTPVLTMPQDLDLDMYMENLECDMDNIISDLMDEGEGLDFNFGWRRATRSFR

SEQ ID NO: 27887 - protein, 80 aa, Synthetic construct
SLVPTLSMIAPPPVMASAPIPKTEAASQDRMPQDLDLDMYMENLECDMDNIISDLMDEGEGLDFNFEPDPGWRRATRSFR

SEQ ID NO: 27888 - protein, 80 aa, Synthetic construct
SLVPTLSMIAPPPVMASAPIPKALGTPVLTMPQDLDLDMYMENLECDMDNIISDLMDEGEGLDFNFEPDPGWRRATRSFR

SEQ ID NO: 27889 - protein, 80 aa, Synthetic construct
DPTRFFTDNLLSLYSGLDEVAEEQTQLFRCPEQDVPFDGSSLDVGMDVSPSEPPWELLPIFPDLQVKSEPGWRRATRSFR

SEQ ID NO: 27890 - protein, 80 aa, Synthetic construct
DPTRFFTDNLLSPEDWLDEVAEEQTQLFRCPEQDVPFDGSSLDVGMDVSPSEPPWELLPIFPDLQVKSEPGWRRATRSFR

SEQ ID NO: 27891 - protein, 80 aa, Synthetic construct
DPTRFFTDNLLSPEDWGLEVAEEQTQLFRCPEQDVPFDGSSLDVGMDVSPSEPPWELLPIFPDLQVKSEPGWRRATRSFR

SEQ ID NO: 27892 - protein, 80 aa, Synthetic construct
DPTRFFTDNLLSPEDWGLQNSTLYTQLFRCPEQDVPFDGSSLDVGMDVSPSEPPWELLPIFPDLQVKSEPGWRRATRSFR

SEQ ID NO: 27893 - protein, 80 aa, Synthetic construct
DPTRFFTDNLLSPEDWGLQNSTLYSGLFRCPEQDVPFDGSSLDVGMDVSPSEPPWELLPIFPDLQVKSEPGWRRATRSFR

SEQ ID NO: 27894 - protein, 80 aa, Synthetic construct
DPTRFFTDNLLSPEDWGLQNSTLYSGLDRCPEQDVPFDGSSLDVGMDVSPSEPPWELLPIFPDLQVKSEPGWRRATRSFR

SEQ ID NO: 27895 - protein, 80 aa, Synthetic construct
DPTRFFTDNLLSPEDWGLQNSTLYSGLDEVPEQDVPFDGSSLDVGMDVSPSEPPWELLPIFPDLQVKSEPGWRRATRSFR

SEQ ID NO: 27896 - protein, 80 aa, Synthetic construct
DPTRFFTDNLLSPEDWGLQNSTLYSGLDEVAEQDVPFDGSSLDVGMDVSPSEPPWELLPIFPDLQVKSEPGWRRATRSFR

SEQ ID NO: 27897 - protein, 80 aa, Synthetic construct
DPTRFFTDNLLSPEDWGLQNSTLYSGLDEVAEEQVPFDGSSLDVGMDVSPSEPPWELLPIFPDLQVKSEPGWRRATRSFR

SEQ ID NO: 27898 - protein, 80 aa, Synthetic construct
DPTRFFTDNLLSPEDWGLQNSTLYSGLDEVAEEQTQFDGSSLDVGMDVSPSEPPWELLPIFPDLQVKSEPGWRRATRSFR

SEQ ID NO: 27899 - protein, 80 aa, Synthetic construct
DPTRFFTDNLLSPEDWGLQNSTLYSGLDEVAEEQTQLFGSSLDVGMDVSPSEPPWELLPIFPDLQVKSEPGWRRATRSFR

SEQ ID NO: 27900 - protein, 80 aa, Synthetic construct
DPTRFFTDNLLSPEDWGLQNSTLYSGLDEVAEEQTQLFRCSLDVGMDVSPSEPPWELLPIFPDLQVKSEPGWRRATRSFR

SEQ ID NO: 27901 - protein, 80 aa, Synthetic construct
DPTRFFTDNLLSPEDWGLQNSTLYSGLDEVAEEQTQLFRCPEDVGMDVSPSEPPWELLPIFPDLQVKSEPGWRRATRSFR

SEQ ID NO: 27902 - protein, 80 aa, Synthetic construct
DPTRFFTDNLLSPEDWGLQNSTLYSGLDEVAEEQTQLFRCPEQDGMDVSPSEPPWELLPIFPDLQVKSEPGWRRATRSFR

SEQ ID NO: 27903 - protein, 80 aa, Synthetic construct
DPTRFFTDNLLSPEDWGLQNSTLYSGLDEVAEEQTQLFRCPEQDVPDVSPSEPPWELLPIFPDLQVKSEPGWRRATRSFR

SEQ ID NO: 27904 - protein, 80 aa, Synthetic construct
DPTRFFTDNLLSPEDWGLQNSTLYSGLDEVAEEQTQLFRCPEQDVPFDSPSEPPWELLPIFPDLQVKSEPGWRRATRSFR

SEQ ID NO: 27905 - protein, 80 aa, Synthetic construct
DPTRFFTDNLLSPEDWGLQNSTLYSGLDEVAEEQTQLFRCPEQDVPFDGSSEPPWELLPIFPDLQVKSEPGWRRATRSFR

SEQ ID NO: 27906 - protein, 80 aa, Synthetic construct
DPTRFFTDNLLSPEDWGLQNSTLYSGLDEVAEEQTQLFRCPEQDVPFDGSSLPPWELLPIFPDLQVKSEPGWRRATRSFR

SEQ ID NO: 27907 - protein, 80 aa, Synthetic construct
DPTRFFTDNLLSPEDWGLQNSTLYSGLDEVAEEQTQLFRCPEQDVPFDGSSLDVGMDVSPFPDLQVKSEPGWRRATRSFR

SEQ ID NO: 27908 - protein, 80 aa, Synthetic construct
STSFEPIKKELSEIFDPTRECMSSELLEELMSSEVFAPLLRLSPPPGDHDYIYNLDESEGVCDLFDVPVLGWRRATRSFR

SEQ ID NO: 27909 - protein, 80 aa, Synthetic construct
STSFEPIKADPTEIFDPTRECMSSELLEELMSSEVFAPLLRLSPPPGDHDYIYNLDESEGVCDLFDVPVLGWRRATRSFR

SEQ ID NO: 27910 - protein, 80 aa, Synthetic construct
STSFEPIKADPTGVLELPRECMSSELLEELMSSEVFAPLLRLSPPPGDHDYIYNLDESEGVCDLFDVPVLGWRRATRSFR

SEQ ID NO: 27911 - protein, 80 aa, Synthetic construct
STSFEPIKADPTGVLELPKELSEIELLEELMSSEVFAPLLRLSPPPGDHDYIYNLDESEGVCDLFDVPVLGWRRATRSFR

SEQ ID NO: 27912 - protein, 80 aa, Synthetic construct
STSFEPIKADPTGVLELPKELSEIFDLEELMSSEVFAPLLRLSPPPGDHDYIYNLDESEGVCDLFDVPVLGWRRATRSFR

SEQ ID NO: 27913 - protein, 80 aa, Synthetic construct
STSFEPIKADPTGVLELPKELSEIFDPTRECMSSELLELLRLSPPPGDHDYIYNLDESEGVCDLFDVPVLGWRRATRSFR

SEQ ID NO: 27914 - protein, 80 aa, Synthetic construct
STSFEPIKADPTGVLELPKELSEIFDPTRECMSSELLEELMSSEVFAPLLYIYNLDESEGVCDLFDVPVLGWRRATRSFR

SEQ ID NO: 27915 - protein, 80 aa, Synthetic construct
STSFEPIKADPTGVLELPKELSEIFDPTRECMSSELLEELMSSEVFAPLLRLYNLDESEGVCDLFDVPVLGWRRATRSFR

SEQ ID NO: 27916 - protein, 80 aa, Synthetic construct
STSFEPIKADPTGVLELPKELSEIFDPTRECMSSELLEELMSSEVFAPLLRLSPPPGDHDYIYNFDVPVLGWRRATRSFR

SEQ ID NO: 27917 - protein, 80 aa, Synthetic construct
SFEPIKKELSEIFDPTRECMSSELLEELMSSEVFAPLLRLSPPPGDHDYIYNLDESEGVCDLFDVPVLNLGWRRATRSFR

SEQ ID NO: 27918 - protein, 80 aa, Synthetic construct
SFEPIKADPTGVLELPKELSEIFDPTRECMSSELLELLRLSPPPGDHDYIYNLDESEGVCDLFDVPVLNLGWRRATRSFR

SEQ ID NO: 27919 - protein, 80 aa, Synthetic construct
SFEPIKADPTGVLELPKELSEIFDPTRECMSSELLEELMSSEVFAPLLRLYNLDESEGVCDLFDVPVLNLGWRRATRSFR

SEQ ID NO: 27920 - protein, 80 aa, Synthetic construct
MSALGGYSSVSSCNGYGRMGLLHQEKLPSDLDGMFIERLDCDMEDTLDFNFDNVLPNQSFPHSVKTTTHSGWRRATRSFR

SEQ ID NO: 27921 - protein, 80 aa, Synthetic construct
GLEGAKLGFCFPDLAETCWKGTSSSLASFPQLDWGSALLHPEVPWGAEPDSQALPWSGDWTDMACTAWDSGWRRATRSFR

SEQ ID NO: 27922 - protein, 80 aa, Synthetic construct
GLEGAKLGFCFPDLALTCWKGTSSSLASFPQLDWGSALLHPEVPWGAEPDSQALPWSGDWTDMACTAWDSGWRRATRSFR

SEQ ID NO: 27923 - protein, 80 aa, Synthetic construct
GLEGAKLGFCFPDLALQGWKGTSSSLASFPQLDWGSALLHPEVPWGAEPDSQALPWSGDWTDMACTAWDSGWRRATRSFR

SEQ ID NO: 27924 - protein, 80 aa, Synthetic construct
FPDLAETCWKGTSSSLASFPQLDWGSALLHPEVPWGAEPDSQALPWSGDWTDMACTAWDSWSGASQTLGPGWRRATRSFR

SEQ ID NO: 27925 - protein, 80 aa, Synthetic construct
FPDLALTCWKGTSSSLASFPQLDWGSALLHPEVPWGAEPDSQALPWSGDWTDMACTAWDSWSGASQTLGPGWRRATRSFR

SEQ ID NO: 27926 - protein, 80 aa, Synthetic construct
FPDLALQGWKGTSSSLASFPQLDWGSALLHPEVPWGAEPDSQALPWSGDWTDMACTAWDSWSGASQTLGPGWRRATRSFR

SEQ ID NO: 27927 - protein, 80 aa, Synthetic construct
AGHLASDFAFPWGAEPGWVDPLTWLSFQGPPGGPGIGPGVGPGSEVWGIPPCPPPYELCGGMAYCGPQVGGWRRATRSFR

SEQ ID NO: 27928 - protein, 80 aa, Synthetic construct
AGHLASDFAFSPPPGGGGDGPWGAEPGWVDPLTWLSFQGVGPGSEVWGIPPCPPPYELCGGMAYCGPQVGGWRRATRSFR

SEQ ID NO: 27929 - protein, 80 aa, Synthetic construct
AGHLASDFAFSPPPGGGGDGPWGAEPGWVDPLTWLSFQGPPGGSEVWGIPPCPPPYELCGGMAYCGPQVGGWRRATRSFR

SEQ ID NO: 27930 - protein, 80 aa, Synthetic construct
AGHLASDFAFSPPPGGGGDGPWGAEPGWVDPLTWLSFQGPPGGPEVWGIPPCPPPYELCGGMAYCGPQVGGWRRATRSFR

SEQ ID NO: 27931 - protein, 80 aa, Synthetic construct
AGHLASDFAFSPPPGGGGDGPWGAEPGWVDPLTWLSFQGPPGGPGIWGIPPCPPPYELCGGMAYCGPQVGGWRRATRSFR

SEQ ID NO: 27932 - protein, 80 aa, Synthetic construct
PWGAEPGWVDPLTWLSFQGPPGGPGIWGIPPCPPPYELCGGMAYCGPQVGVGLVPQGGLETSQPESEAGVGWRRATRSFR

SEQ ID NO: 27933 - protein, 80 aa, Synthetic construct
HLPTTDEFSFSENLFGVLNLEVEPYSQYSNVQFPQVQPQISSSSYYSNLGFYPQQPEEWYSPGIYELRRMGWRRATRSFR

SEQ ID NO: 27934 - protein, 80 aa, Synthetic construct
HLPTTDEFSFSENLFGVLTEQVAGPLGQNLEVEPYSQYSNVQFPYYSNLGFYPQQPEEWYSPGIYELRRMGWRRATRSFR

SEQ ID NO: 27935 - protein, 80 aa, Synthetic construct
AFEDAFEVLRQHSTGDLQYSPDYRNYLALINHRPHVKGNSSCYGVLPTEEPVYNWRTVINSAADFYFEGNGWRRATRSFR

SEQ ID NO: 27936 - protein, 80 aa, Synthetic construct
TCEDAFEVLRQHSTGDLQYSPDYRNYLALINHRPHVKGNSSCYGVLPTEEPVYNWRTVINSAADFYFEGNGWRRATRSFR

SEQ ID NO: 27937 - protein, 80 aa, Synthetic construct
TCVEQDKLGQAFEDGDLQYSPDYRNYLALINHRPHVKGNSSCYGVLPTEEPVYNWRTVINSAADFYFEGNGWRRATRSFR

SEQ ID NO: 27938 - protein, 80 aa, Synthetic construct
TCVEQDKLGQAFEDAFLQYSPDYRNYLALINHRPHVKGNSSCYGVLPTEEPVYNWRTVINSAADFYFEGNGWRRATRSFR

SEQ ID NO: 27939 - protein, 80 aa, Synthetic construct
TCVEQDKLGQAFEDAFEVYSPDYRNYLALINHRPHVKGNSSCYGVLPTEEPVYNWRTVINSAADFYFEGNGWRRATRSFR

SEQ ID NO: 27940 - protein, 80 aa, Synthetic construct
TCVEQDKLGQAFEDAFEVLRQHSTGDLQYSPDYRNYLANSSCYGVLPTEEPVYNWRTVINSAADFYFEGNGWRRATRSFR

SEQ ID NO: 27941 - protein, 80 aa, Synthetic construct
TCVEQDKLGQAFEDAFEVLRQHSTGDLQYSPDYRNYLALINHYGVLPTEEPVYNWRTVINSAADFYFEGNGWRRATRSFR

SEQ ID NO: 27942 - protein, 80 aa, Synthetic construct
DAVLEPFPADRLFPGSSFLDLGDLNESDFLNNAHFPEHLDHFLFSSFFDDPVLDEKSPLLDMELDSPTPGGWRRATRSFR

SEQ ID NO: 27943 - protein, 80 aa, Synthetic construct
DAVLEPFPADRLFPGSSFLDLGDLNESDFLNNAHFPEHLDHFTENMEDFSNDLFSSFFLLDMELDSPTPGGWRRATRSFR

SEQ ID NO: 27944 - protein, 80 aa, Synthetic construct
RLFPGSSDFLNNAHFPEHLDHFTENMEDFSNDLFSSFFDDPVLDEKSPLLDMELDSPTPGIQAEHSYSLSGWRRATRSFR

SEQ ID NO: 27945 - protein, 80 aa, Synthetic construct
RLFPGSSFFLNNAHFPEHLDHFTENMEDFSNDLFSSFFDDPVLDEKSPLLDMELDSPTPGIQAEHSYSLSGWRRATRSFR

SEQ ID NO: 27946 - protein, 80 aa, Synthetic construct
RLFPGSSFLDLGDLNESDFLHFTENMEDFSNDLFSSFFDDPVLDEKSPLLDMELDSPTPGIQAEHSYSLSGWRRATRSFR

SEQ ID NO: 27947 - protein, 80 aa, Synthetic construct
RLFPGSSFLDLGDLNESDFLNNAHFPEHLDHFLFSSFFDDPVLDEKSPLLDMELDSPTPGIQAEHSYSLSGWRRATRSFR

SEQ ID NO: 27948 - protein, 80 aa, Synthetic construct
RLFPGSSFLDLGDLNESDFLNNAHFPEHLDHFTENMFFDDPVLDEKSPLLDMELDSPTPGIQAEHSYSLSGWRRATRSFR

SEQ ID NO: 27949 - protein, 80 aa, Synthetic construct
RLFPGSSFLDLGDLNESDFLNNAHFPEHLDHFTENMEDFSNDLFSSFFLLDMELDSPTPGIQAEHSYSLSGWRRATRSFR

SEQ ID NO: 27950 - protein, 80 aa, Synthetic construct
RLFPGSSFLDLGDLNESDFLNNAHFPEHLDHFTENMEDFSNDLFSSFFDDPVLDEKSPLLDMAEHSYSLSGWRRATRSFR

SEQ ID NO: 27951 - protein, 80 aa, Synthetic construct
RLFPGSSFLDLGDLNESDFLNNAHFPEHLDHFTENMEDFSNDLFSSFFDDPVLDEKSPLLDMELHSYSLSGWRRATRSFR

SEQ ID NO: 27952 - protein, 80 aa, Synthetic construct
RLFPGSSFLDLGDLNESDFLNNAHFPEHLDHFTENMEDFSNDLFSSFFDDPVLDEKSPLLDMELDSYSLSGWRRATRSFR

SEQ ID NO: 27953 - protein, 80 aa, Synthetic construct
PTYPSLYSSYNLPMWSNQTWNNSTWSNQTQNIQSWSNHSWNTQTWCTQSWNNQAWNSPFYNCGEESLQSCGWRRATRSFR

SEQ ID NO: 27954 - protein, 80 aa, Synthetic construct
PTYPSLYSSYHQGCLVNPTWNNSTWSNQTQNIQSWSNHSWNTQTWCTQSWNNQAWNSPFYNCGEESLQSCGWRRATRSFR

SEQ ID NO: 27955 - protein, 80 aa, Synthetic construct
PTYPSLYSSYHQGCLVNPTGNLPMWSNQTWNNQSWSNHSWNTQTWCTQSWNNQAWNSPFYNCGEESLQSCGWRRATRSFR

SEQ ID NO: 27956 - protein, 80 aa, Synthetic construct
PTYPSLYSSYHQGCLVNPTGNLPMWSNQTWNNSTWSNHSWNTQTWCTQSWNNQAWNSPFYNCGEESLQSCGWRRATRSFR

SEQ ID NO: 27957 - protein, 80 aa, Synthetic construct
PTYPSLYSSYHQGCLVNPTGNLPMWSNQTWNNSTWSNQSWNTQTWCTQSWNNQAWNSPFYNCGEESLQSCGWRRATRSFR

SEQ ID NO: 27958 - protein, 80 aa, Synthetic construct
PTYPSLYSSYHQGCLVNPTGNLPMWSNQTWNNSTWSNQTQNIQSWSNHSWNTQTWCTQSWNNQAWNSPFYGWRRATRSFR

SEQ ID NO: 27959 - protein, 80 aa, Synthetic construct
HQGCLVNPTGNLPMWSNQTWNIQSWSNHSWNTQTWCTQSWNNQAWNSPFYNCGEESLQSCMQFQPNSPASGWRRATRSFR

SEQ ID NO: 27960 - protein, 80 aa, Synthetic construct
NIQSWSNHSWNTQTWCTQSWNNQAWNSPFYNCGEESLQSCMQFQPNSPASDLEAVIQQTTRYFSTPQTMDGWRRATRSFR

SEQ ID NO: 27961 - protein, 80 aa, Synthetic construct
NIQSWSNHSWNTQTWCTQSWNNQAWNSPFYNCGEESLQSCMQFQPNSPASDLEAALEATTRYFSTPQTMDGWRRATRSFR

SEQ ID NO: 27962 - protein, 80 aa, Synthetic construct
NIQSWSNHSWNTQTWCTQSWNNQAWNSPFYNCGEESLQSCMQFQPNSPASDLEAALEAAGRYFSTPQTMDGWRRATRSFR

SEQ ID NO: 27963 - protein, 80 aa, Synthetic construct
NTQTWCTQSWNNQAWNSPFYMQFQPNSPASDLEAALEAAGEGLNVIQQTTRYFSTPQTMDLFLNYSMNMQGWRRATRSFR

SEQ ID NO: 27964 - protein, 80 aa, Synthetic construct
NTQTWCTQSWNNQAWNSPFYNCGEESLQSCDLEAALEAAGEGLNVIQQTTRYFSTPQTMDLFLNYSMNMQGWRRATRSFR

SEQ ID NO: 27965 - protein, 80 aa, Synthetic construct
NTQTWCTQSWNNQAWNSPFYNCGEESLQSCMQFQPNSPASDLLNVIQQTTRYFSTPQTMDLFLNYSMNMQGWRRATRSFR

SEQ ID NO: 27966 - protein, 80 aa, Synthetic construct
NTQTWCTQSWNNQAWNSPFYNCGEESLQSCMQFQPNSPASDLEAVIQQTTRYFSTPQTMDLFLNYSMNMQGWRRATRSFR

SEQ ID NO: 27967 - protein, 80 aa, Synthetic construct
NTQTWCTQSWNNQAWNSPFYNCGEESLQSCMQFQPNSPASDLEAALQQTTRYFSTPQTMDLFLNYSMNMQGWRRATRSFR

SEQ ID NO: 27968 - protein, 80 aa, Synthetic construct
NTQTWCTQSWNNQAWNSPFYNCGEESLQSCMQFQPNSPASDLEAALEATTRYFSTPQTMDLFLNYSMNMQGWRRATRSFR

SEQ ID NO: 27969 - protein, 80 aa, Synthetic construct
NTQTWCTQSWNNQAWNSPFYNCGEESLQSCMQFQPNSPASDLEAALEAAGRYFSTPQTMDLFLNYSMNMQGWRRATRSFR

SEQ ID NO: 27970 - protein, 80 aa, Synthetic construct
NTQTWCTQSWNNQAWNSPFYNCGEESLQSCMQFQPNSPASDLEAALEAAGEGLNVIQTMDLFLNYSMNMQGWRRATRSFR

SEQ ID NO: 27971 - protein, 80 aa, Synthetic construct
NTQTWCTQSWNNQAWNSPFYNCGEESLQSCMQFQPNSPASDLEAALEAAGEGLNVIQQMDLFLNYSMNMQGWRRATRSFR

SEQ ID NO: 27972 - protein, 80 aa, Synthetic construct
WCTQSWNNQAWNSPFYMQFQPNSPASDLEAALEAAGEGLNVIQQTTRYFSTPQTMDLFLNYSMNMQPEDVGWRRATRSFR

SEQ ID NO: 27973 - protein, 80 aa, Synthetic construct
WCTQSWNNQAWNSPFYNCFQPNSPASDLEAALEAAGEGLNVIQQTTRYFSTPQTMDLFLNYSMNMQPEDVGWRRATRSFR

SEQ ID NO: 27974 - protein, 80 aa, Synthetic construct
WCTQSWNNQAWNSPFYNCGEESLQASDLEAALEAAGEGLNVIQQTTRYFSTPQTMDLFLNYSMNMQPEDVGWRRATRSFR

SEQ ID NO: 27975 - protein, 80 aa, Synthetic construct
WCTQSWNNQAWNSPFYNCGEESLQSCDLEAALEAAGEGLNVIQQTTRYFSTPQTMDLFLNYSMNMQPEDVGWRRATRSFR

SEQ ID NO: 27976 - protein, 80 aa, Synthetic construct
WCTQSWNNQAWNSPFYNCGEESLQSCMQFQALEAAGEGLNVIQQTTRYFSTPQTMDLFLNYSMNMQPEDVGWRRATRSFR

SEQ ID NO: 27977 - protein, 80 aa, Synthetic construct
WCTQSWNNQAWNSPFYNCGEESLQSCMQFQPNSPASEGLNVIQQTTRYFSTPQTMDLFLNYSMNMQPEDVGWRRATRSFR

SEQ ID NO: 27978 - protein, 80 aa, Synthetic construct
WCTQSWNNQAWNSPFYNCGEESLQSCMQFQPNSPASDLLNVIQQTTRYFSTPQTMDLFLNYSMNMQPEDVGWRRATRSFR

SEQ ID NO: 27979 - protein, 80 aa, Synthetic construct
WCTQSWNNQAWNSPFYNCGEESLQSCMQFQPNSPASDLEAVIQQTTRYFSTPQTMDLFLNYSMNMQPEDVGWRRATRSFR

SEQ ID NO: 27980 - protein, 80 aa, Synthetic construct
WCTQSWNNQAWNSPFYNCGEESLQSCMQFQPNSPASDLEAALQQTTRYFSTPQTMDLFLNYSMNMQPEDVGWRRATRSFR

SEQ ID NO: 27981 - protein, 80 aa, Synthetic construct
WCTQSWNNQAWNSPFYNCGEESLQSCMQFQPNSPASDLEAALEATTRYFSTPQTMDLFLNYSMNMQPEDVGWRRATRSFR

SEQ ID NO: 27982 - protein, 80 aa, Synthetic construct
WCTQSWNNQAWNSPFYNCGEESLQSCMQFQPNSPASDLEAALEAAGRYFSTPQTMDLFLNYSMNMQPEDVGWRRATRSFR

SEQ ID NO: 27983 - protein, 80 aa, Synthetic construct
WCTQSWNNQAWNSPFYNCGEESLQSCMQFQPNSPASDLEAALEAAGEGLNVIQTMDLFLNYSMNMQPEDVGWRRATRSFR

SEQ ID NO: 27984 - protein, 80 aa, Synthetic construct
WCTQSWNNQAWNSPFYNCGEESLQSCMQFQPNSPASDLEAALEAAGEGLNVIQQMDLFLNYSMNMQPEDVGWRRATRSFR

SEQ ID NO: 27985 - protein, 80 aa, Synthetic construct
QDSKNSDLYSIMKNLGIDKFFRNDFSGEVDFRDIDLTDEILTYVQDSLSKSPFIPSDYQQQQSLALNSSCGWRRATRSFR

SEQ ID NO: 27986 - protein, 80 aa, Synthetic construct
QDSKNSDLYSIMKNLGIDFEDIRHMQGEVDFRDIDLTDEILTYVQDSLSKSPFIPSDYQQQQSLALNSSCGWRRATRSFR

SEQ ID NO: 27987 - protein, 80 aa, Synthetic construct
QDSKNSDLYSIMKNLGIDFEDIRHMQNEKFFRNDFSGEVDFRDIDLTDEILTYVQDSLSKSPFIALNSSCGWRRATRSFR

SEQ ID NO: 27988 - protein, 80 aa, Synthetic construct
RLQQHKDEDLSSLVQDDDMLYWVPMEEDPLLDTDMLMSEFSDTLFSTLSSHQPVAWPNPREIAHLGNADMGWRRATRSFR

SEQ ID NO: 27989 - protein, 80 aa, Synthetic construct
RLQQHKDEDLSSLVQDDDMLYWHKMEEDPLLDTDMLMSEFSDTLFSTLSSHQPVAWPNPREIAHLGNADMGWRRATRSFR

SEQ ID NO: 27990 - protein, 80 aa, Synthetic construct
YWVPMEEDPLLDTDMLMSEFSDTLFSTLSSHQPVAWPNPREIAHLGNADMIQPGLIPLQPNLDFMDTFEPGWRRATRSFR

SEQ ID NO: 27991 - protein, 80 aa, Synthetic construct
YWHKMEEDPLLDTDMLMSEFSDTLFSTLSSHQPVAWPNPREIAHLGNADMIQPGLIPLQPNLDFMDTFEPGWRRATRSFR

SEQ ID NO: 27992 - protein, 80 aa, Synthetic construct
TPVPMEEDPLLDTDMLMSEFSDTLFSTLSSHQPVAWPNPREIAHLIPLQPNLDFMDTFEPFQDLFSSSRSGWRRATRSFR

SEQ ID NO: 27993 - protein, 80 aa, Synthetic construct
LDTDMLMSEFSDTLFSTLSSHQPVAWPNDMIQPGLIPLQPNLDFMDTFEPFQDLFSSSRSIFGSMLPASAGWRRATRSFR

SEQ ID NO: 27994 - protein, 80 aa, Synthetic construct
LDTDMLMSEFSDTLFSTLSSHQPVAWPNPREIAHLIPLQPNLDFMDTFEPFQDLFSSSRSIFGSMLPASAGWRRATRSFR

SEQ ID NO: 27995 - protein, 80 aa, Synthetic construct
LDTDMLMSEFSDTLFSTLSSHQPVAWPNPREIAHLGNADMIQPGLIPLQPNLDFMDTFRSIFGSMLPASAGWRRATRSFR

SEQ ID NO: 27996 - protein, 80 aa, Synthetic construct
SPSPYAFSPVISDFYSSLPSQPLDPSNWAWNSTFTESSTSDFQMQDTQWERLVASVPALYSDAYDIFQIIGWRRATRSFR

SEQ ID NO: 27997 - protein, 80 aa, Synthetic construct
ISDFYSSLPSQPLDPSNWAWNSTFTESSTSDFQMQDTQWERLVASVPALYELYNLPDENEISSSSFHCLYGWRRATRSFR

SEQ ID NO: 27998 - protein, 80 aa, Synthetic construct
ISDFYSSLPSQPLDPSNWAWNSTFTESSTSDFQMQDTQWERLVASVPALYSDYNLPDENEISSSSFHCLYGWRRATRSFR

SEQ ID NO: 27999 - protein, 80 aa, Synthetic construct
ISDFYSSLPSQPLDPSNWAWNSTFTESSTSDFQMQDTQWERLVASVPALYSDAYLPDENEISSSSFHCLYGWRRATRSFR

SEQ ID NO: 28000 - protein, 80 aa, Synthetic construct
ISDFYSSLPSQPLDPSNWAWNSTFTESSTSDFQMQDTQWERLVASVPALYSDAYDIDENEISSSSFHCLYGWRRATRSFR

SEQ ID NO: 28001 - protein, 80 aa, Synthetic construct
ISDFYSSLPSQPLDPSNWAWNSTFTESSTSDFQMQDTQWERLVASVPALYSDAYDIFQNEISSSSFHCLYGWRRATRSFR

SEQ ID NO: 28002 - protein, 80 aa, Synthetic construct
ISDFYSSLPSQPLDPSNWAWNSTFTESSTSDFQMQDTQWERLVASVPALYSDAYDIFQIIISSSSFHCLYGWRRATRSFR

SEQ ID NO: 28003 - protein, 80 aa, Synthetic construct
DFQMQDTQWERLVASVPALYSDAYDIFQIIELYNLPDENEISSSSFHCLYQYLSPTKYQVGGQGSSLSIFGWRRATRSFR

SEQ ID NO: 28004 - protein, 80 aa, Synthetic construct
NSQMQDTQWERLVASVPALYSDAYDIFQIIELYNLPDENEISSSSFHCLYQYLSPTKYQVGGQGSSLSIFGWRRATRSFR

SEQ ID NO: 28005 - protein, 80 aa, Synthetic construct
NSTFQDTQWERLVASVPALYSDAYDIFQIIELYNLPDENEISSSSFHCLYQYLSPTKYQVGGQGSSLSIFGWRRATRSFR

SEQ ID NO: 28006 - protein, 80 aa, Synthetic construct
NSTFTETQWERLVASVPALYSDAYDIFQIIELYNLPDENEISSSSFHCLYQYLSPTKYQVGGQGSSLSIFGWRRATRSFR

SEQ ID NO: 28007 - protein, 80 aa, Synthetic construct
NSTFTESSWERLVASVPALYSDAYDIFQIIELYNLPDENEISSSSFHCLYQYLSPTKYQVGGQGSSLSIFGWRRATRSFR

SEQ ID NO: 28008 - protein, 80 aa, Synthetic construct
NSTFTESSTSDFQMQDTQWERLVASVPALYSDAYDIFQIIELYNLPDENEISSSSFHCLYQYLSSSLSIFGWRRATRSFR

SEQ ID NO: 28009 - protein, 80 aa, Synthetic construct
NSTFTESSTSDFQMQDTQWERLVASVPALYSDAYDIFQIIELYNLPDENEISSSSFHCLYQYLSPTLSIFGWRRATRSFR

SEQ ID NO: 28010 - protein, 80 aa, Synthetic construct
NSTFTESSTSDFQMQDTQWERLVASVPALYSDAYDIFQIIELYNLPDENEISSSSFHCLYQYLSPTKYIFGWRRATRSFR

SEQ ID NO: 28011 - protein, 80 aa, Synthetic construct
NSTFTESSTSDFQMQDTQWERLVASVPALYSDAYDIFQIIELYNLPDENEISSSSFHCLYQYLSPTKYQVGWRRATRSFR

SEQ ID NO: 28012 - protein, 80 aa, Synthetic construct
DFQMQDTQWERLVASVPALYSDAYDIFQIIELYNLPDENEISSSSFHCLYQYLSPTLSIFAGPAVGLSPAGWRRATRSFR

SEQ ID NO: 28013 - protein, 80 aa, Synthetic construct
DFQMQDTQWERLVASVPALYSDAYDIFQIIELYNLPDENEISSSSFHCLYQYLSPTKYIFAGPAVGLSPAGWRRATRSFR

SEQ ID NO: 28014 - protein, 80 aa, Synthetic construct
DFQMQDTQWERLVASVPALYSDAYDIFQIIELYNLPDENEISSSSFHCLYQYLSPTKYQVAGPAVGLSPAGWRRATRSFR

SEQ ID NO: 28015 - protein, 80 aa, Synthetic construct
DFQMQDTQWERLVASVPALYSDAYDIFQIIELYNLPDENEISSSSFHCLYQYLSPTKYQVGGPAVGLSPAGWRRATRSFR

SEQ ID NO: 28016 - protein, 80 aa, Synthetic construct
DFQMQDTQWERLVASVPALYSDAYDIFQIIELYNLPDENEISSSSFHCLYQYLSPTKYQVGGQGVGLSPAGWRRATRSFR

SEQ ID NO: 28017 - protein, 80 aa, Synthetic construct
DFQMQDTQWERLVASVPALYSDAYDIFQIIELYNLPDENEISSSSFHCLYQYLSPTKYQVGGQGSSLSPAGWRRATRSFR

SEQ ID NO: 28018 - protein, 80 aa, Synthetic construct
SNFAAAPAFSHYMGYPHMPSMDPHWPSLGVWGSPYSPPREDWSVYPGPDVTSSPAAFCSTDYSNLGPVGGGWRRATRSFR

SEQ ID NO: 28019 - protein, 80 aa, Synthetic construct
SNFAAAPAFSHYMGYPHMPSMDPHWPSLGVWGSPYSPPREDWSVYPGPSSTMSPAAFCSTDYSNLGPVGGGWRRATRSFR

SEQ ID NO: 28020 - protein, 80 aa, Synthetic construct
SNFAAAPAFSHYMGYPHMPSMDPHWPSLGVWGSPYSPPREDWSVYPGPSSTMGTAAFCSTDYSNLGPVGGGWRRATRSFR

SEQ ID NO: 28021 - protein, 80 aa, Synthetic construct
SNFAAAPAFSHYMGYPHMPSMDPHWPSLGVWGSPYSPPREDWSVYPGPSSTMGTVPFCSTDYSNLGPVGGGWRRATRSFR

SEQ ID NO: 28022 - protein, 80 aa, Synthetic construct
PSAITTANIRPVSPGISDANDHDLREPSGIKNPGGASASARVSSWDSQSYNPPWASTLFEIDEFVKIYDLGWRRATRSFR

SEQ ID NO: 28023 - protein, 80 aa, Synthetic construct
PSAITTANIRPVSPGISDANDHDLREPSGIKNPGGASASARVSSWDSQSYDIEQICTLFEIDEFVKIYDLGWRRATRSFR

SEQ ID NO: 28024 - protein, 80 aa, Synthetic construct
DIPSSGLLSGQAQENPGYPYSDIGIDMIDNDQGSSSPSNDEAAMAVIMSLLEADAGLGGPVDFSDLPWPLGWRRATRSFR

SEQ ID NO: 28025 - protein, 80 aa, Synthetic construct
DIPSSGLLSGQAQENPGYPYSDSSSILGENPHIGIDPSNDEAAMAVIMSLLEADAGLGGPVDFSDLPWPLGWRRATRSFR

SEQ ID NO: 28026 - protein, 80 aa, Synthetic construct
DIPSSGLLSGQAQENPGYPYSDSSSILGENPHIGIDMINDEAAMAVIMSLLEADAGLGGPVDFSDLPWPLGWRRATRSFR

SEQ ID NO: 28027 - protein, 80 aa, Synthetic construct
DIPSSGLLSGQAQENPGYPYSDSSSILGENPHIGIDMIDNEAAMAVIMSLLEADAGLGGPVDFSDLPWPLGWRRATRSFR

SEQ ID NO: 28028 - protein, 80 aa, Synthetic construct
DIPSSGLLSGQAQENPGYPYSDSSSILGENPHIGIDMIDNDQAMAVIMSLLEADAGLGGPVDFSDLPWPLGWRRATRSFR

SEQ ID NO: 28029 - protein, 80 aa, Synthetic construct
HELNSAAALGVYGGPYGGSQGYGNYVTYGSEASAFYSLNSFDGLAPAAAAYYPYEPALGQYPYDRYGTMDGWRRATRSFR

SEQ ID NO: 28030 - protein, 80 aa, Synthetic construct
HQGCLVNPTGNLPMWSNQTWNIQSWSNHSWNTQTWCTQSWNNQAWNSPFYNCGEESLQSCMHFQPNSPASGWRRATRSFR

SEQ ID NO: 28031 - protein, 80 aa, Synthetic construct
NIQSWSNHSWNTQTWCTQSWNNQAWNSPFYNCGEESLQSCMHFQPNSPASDLEAALQQTTRYFSTPQTMDGWRRATRSFR

SEQ ID NO: 28032 - protein, 80 aa, Synthetic construct
NIQSWSNHSWNTQTWCTQSWNNQAWNSPFYNCGEESLQSCMHFQPNSPASDLEAALEATTRYFSTPQTMDGWRRATRSFR

SEQ ID NO: 28033 - protein, 80 aa, Synthetic construct
NIQSWSNHSWNTQTWCTQSWNNQAWNSPFYNCGEESLQSCMHFQPNSPASDLEAALEAAGRYFSTPQTMDGWRRATRSFR

SEQ ID NO: 28034 - protein, 80 aa, Synthetic construct
NTQTWCTQSWNNQAWNSPFYNCGEESLQSCMHFQALEAAGEGLNVIQQTTRYFSTPQTMDLFLNYSMNMQGWRRATRSFR

SEQ ID NO: 28035 - protein, 80 aa, Synthetic construct
NTQTWCTQSWNNQAWNSPFYNCGEESLQSCMHFQPNSPASDLEAVIQQTTRYFSTPQTMDLFLNYSMNMQGWRRATRSFR

SEQ ID NO: 28036 - protein, 80 aa, Synthetic construct
NTQTWCTQSWNNQAWNSPFYNCGEESLQSCMHFQPNSPASDLEAALQQTTRYFSTPQTMDLFLNYSMNMQGWRRATRSFR

SEQ ID NO: 28037 - protein, 80 aa, Synthetic construct
NTQTWCTQSWNNQAWNSPFYNCGEESLQSCMHFQPNSPASDLEAALEATTRYFSTPQTMDLFLNYSMNMQGWRRATRSFR

SEQ ID NO: 28038 - protein, 80 aa, Synthetic construct
NTQTWCTQSWNNQAWNSPFYNCGEESLQSCMHFQPNSPASDLEAALEAAGRYFSTPQTMDLFLNYSMNMQGWRRATRSFR

SEQ ID NO: 28039 - protein, 80 aa, Synthetic construct
NTQTWCTQSWNNQAWNSPFYNCGEESLQSCMHFQPNSPASDLEAALEAAGEGLNVIQTMDLFLNYSMNMQGWRRATRSFR

SEQ ID NO: 28040 - protein, 80 aa, Synthetic construct
NTQTWCTQSWNNQAWNSPFYNCGEESLQSCMHFQPNSPASDLEAALEAAGEGLNVIQQMDLFLNYSMNMQGWRRATRSFR

SEQ ID NO: 28041 - protein, 80 aa, Synthetic construct
WCTQSWNNQAWNSPFYMHFQPNSPASDLEAALEAAGEGLNVIQQTTRYFSTPQTMDLFLNYSMNMQPEDVGWRRATRSFR

SEQ ID NO: 28042 - protein, 80 aa, Synthetic construct
WCTQSWNNQAWNSPFYNCGEESLQSCMHEAALEAAGEGLNVIQQTTRYFSTPQTMDLFLNYSMNMQPEDVGWRRATRSFR

SEQ ID NO: 28043 - protein, 80 aa, Synthetic construct
WCTQSWNNQAWNSPFYNCGEESLQSCMHFQALEAAGEGLNVIQQTTRYFSTPQTMDLFLNYSMNMQPEDVGWRRATRSFR

SEQ ID NO: 28044 - protein, 80 aa, Synthetic construct
WCTQSWNNQAWNSPFYNCGEESLQSCMHFQPNEAAGEGLNVIQQTTRYFSTPQTMDLFLNYSMNMQPEDVGWRRATRSFR

SEQ ID NO: 28045 - protein, 80 aa, Synthetic construct
WCTQSWNNQAWNSPFYNCGEESLQSCMHFQPNSPAGEGLNVIQQTTRYFSTPQTMDLFLNYSMNMQPEDVGWRRATRSFR

SEQ ID NO: 28046 - protein, 80 aa, Synthetic construct
WCTQSWNNQAWNSPFYNCGEESLQSCMHFQPNSPASEGLNVIQQTTRYFSTPQTMDLFLNYSMNMQPEDVGWRRATRSFR

SEQ ID NO: 28047 - protein, 80 aa, Synthetic construct
WCTQSWNNQAWNSPFYNCGEESLQSCMHFQPNSPASDLLNVIQQTTRYFSTPQTMDLFLNYSMNMQPEDVGWRRATRSFR

SEQ ID NO: 28048 - protein, 80 aa, Synthetic construct
WCTQSWNNQAWNSPFYNCGEESLQSCMHFQPNSPASDLEAVIQQTTRYFSTPQTMDLFLNYSMNMQPEDVGWRRATRSFR

SEQ ID NO: 28049 - protein, 80 aa, Synthetic construct
WCTQSWNNQAWNSPFYNCGEESLQSCMHFQPNSPASDLEAALQQTTRYFSTPQTMDLFLNYSMNMQPEDVGWRRATRSFR

SEQ ID NO: 28050 - protein, 80 aa, Synthetic construct
WCTQSWNNQAWNSPFYNCGEESLQSCMHFQPNSPASDLEAALEATTRYFSTPQTMDLFLNYSMNMQPEDVGWRRATRSFR

SEQ ID NO: 28051 - protein, 80 aa, Synthetic construct
WCTQSWNNQAWNSPFYNCGEESLQSCMHFQPNSPASDLEAALEAAGRYFSTPQTMDLFLNYSMNMQPEDVGWRRATRSFR

SEQ ID NO: 28052 - protein, 80 aa, Synthetic construct
WCTQSWNNQAWNSPFYNCGEESLQSCMHFQPNSPASDLEAALEAAGEGLNVIQTMDLFLNYSMNMQPEDVGWRRATRSFR

SEQ ID NO: 28053 - protein, 80 aa, Synthetic construct
WCTQSWNNQAWNSPFYNCGEESLQSCMHFQPNSPASDLEAALEAAGEGLNVIQQMDLFLNYSMNMQPEDVGWRRATRSFR

SEQ ID NO: 28054 - protein, 80 aa, Synthetic construct
ELQLVHDTGYFSALPSLEETWQQTCLELERYLQTEPRRISETFGEDLDCFLHASPPPCIEESFRRLDPLLGWRRATRSFR

SEQ ID NO: 28055 - protein, 80 aa, Synthetic construct
DVQLVHDTGYFSALPSLEETWQQTCLELERYLQTEPRRISETFGEDLDCFLHASPPPCIEESFRRLDPLLGWRRATRSFR

SEQ ID NO: 28056 - protein, 80 aa, Synthetic construct
DVLAVHDTGYFSALPSLEETWQQTCLELERYLQTEPRRISETFGEDLDCFLHASPPPCIEESFRRLDPLLGWRRATRSFR

SEQ ID NO: 28057 - protein, 80 aa, Synthetic construct
DVLASYDTGYFSALPSLEETWQQTCLELERYLQTEPRRISETFGEDLDCFLHASPPPCIEESFRRLDPLLGWRRATRSFR

SEQ ID NO: 28058 - protein, 80 aa, Synthetic construct
DVLASYSIGYFSALPSLEETWQQTCLELERYLQTEPRRISETFGEDLDCFLHASPPPCIEESFRRLDPLLGWRRATRSFR

SEQ ID NO: 28059 - protein, 80 aa, Synthetic construct
DVLASYSIFQFSALPSLEETWQQTCLELERYLQTEPRRISETFGEDLDCFLHASPPPCIEESFRRLDPLLGWRRATRSFR

SEQ ID NO: 28060 - protein, 80 aa, Synthetic construct
DVLASYSIFQELALPSLEETWQQTCLELERYLQTEPRRISETFGEDLDCFLHASPPPCIEESFRRLDPLLGWRRATRSFR

SEQ ID NO: 28061 - protein, 80 aa, Synthetic construct
DVLASYSIFQELQLPSLEETWQQTCLELERYLQTEPRRISETFGEDLDCFLHASPPPCIEESFRRLDPLLGWRRATRSFR

SEQ ID NO: 28062 - protein, 80 aa, Synthetic construct
DVLASYSIFQELQLVHDTETWQQTCLELERYLQTEPRRISETFGEDLDCFLHASPPPCIEESFRRLDPLLGWRRATRSFR

SEQ ID NO: 28063 - protein, 80 aa, Synthetic construct
DVLASYSIFQELQLVHDTGYWQQTCLELERYLQTEPRRISETFGEDLDCFLHASPPPCIEESFRRLDPLLGWRRATRSFR

SEQ ID NO: 28064 - protein, 80 aa, Synthetic construct
DVLASYSIFQELQLVHDTGYFSQTCLELERYLQTEPRRISETFGEDLDCFLHASPPPCIEESFRRLDPLLGWRRATRSFR

SEQ ID NO: 28065 - protein, 80 aa, Synthetic construct
ELQLVHDTGYFSALPSLEETWQQTCLELERYLQTEPRRISETFGEDLDIEESFRRLDPLLLPVEAAICEKGWRRATRSFR

SEQ ID NO: 28066 - protein, 80 aa, Synthetic construct
ELQLVHDTGYFSALPSLEETWQQTCLELERYLQTEPRRISETFGEDLDCFESFRRLDPLLLPVEAAICEKGWRRATRSFR

SEQ ID NO: 28067 - protein, 80 aa, Synthetic construct
ELQLVHDTGYFSALPSLEETWQQTCLELERYLQTEPRRISETFGEDLDCFLHASRLDPLLLPVEAAICEKGWRRATRSFR

SEQ ID NO: 28068 - protein, 80 aa, Synthetic construct
ELQLVHDTGYFSALPSLEETWQQTCLELERYLQTEPRRISETFGEDLDCFLHASPPDPLLLPVEAAICEKGWRRATRSFR

SEQ ID NO: 28069 - protein, 80 aa, Synthetic construct
ELQLVHDTGYFSALPSLEETWQQTCLELERYLQTEPRRISETFGEDLDCFLHASPPPCLLLPVEAAICEKGWRRATRSFR

SEQ ID NO: 28070 - protein, 80 aa, Synthetic construct
ELQLVHDTGYFSALPSLEETWQQTCLELERYLQTEPRRISETFGEDLDCFLHASPPPCIEESFRAAICEKGWRRATRSFR

SEQ ID NO: 28071 - protein, 80 aa, Synthetic construct
ELQLVHDTGYFSALPSLEETWQQTCLELERYLQTEPRRISETFGEDLDCFLHASPPPCIEESFRRLICEKGWRRATRSFR

SEQ ID NO: 28072 - protein, 80 aa, Synthetic construct
FSALPSLEETWQQTCLELERYLQTEPRRISETFGEDLDIEESFRRLDPLLLPVEAAICEKSSAVDILLSRGWRRATRSFR

SEQ ID NO: 28073 - protein, 80 aa, Synthetic construct
FSALPSLEETWQQTCLELERYLQTEPRRISETFGEDLDCFLHASPPPCIEESFRRLDPLLSSAVDILLSRGWRRATRSFR

SEQ ID NO: 28074 - protein, 80 aa, Synthetic construct
FSALPSLEETWQQTCLELERYLQTEPRRISETFGEDLDCFLHASPPPCIEESFRRLDPLLLPAVDILLSRGWRRATRSFR

SEQ ID NO: 28075 - protein, 80 aa, Synthetic construct
FSALPSLEETWQQTCLELERYLQTEPRRISETFGEDLDCFLHASPPPCIEESFRRLDPLLLPVEDILLSRGWRRATRSFR

SEQ ID NO: 28076 - protein, 80 aa, Synthetic construct
FSALPSLEETWQQTCLELERYLQTEPRRISETFGEDLDCFLHASPPPCIEESFRRLDPLLLPVEAALLSRGWRRATRSFR

SEQ ID NO: 28077 - protein, 80 aa, Synthetic construct
FSALPSLEETWQQTCLELERYLQTEPRRISETFGEDLDCFLHASPPPCIEESFRRLDPLLLPVEAAICSRGWRRATRSFR

SEQ ID NO: 28078 - protein, 80 aa, Synthetic construct
FSKLLQPDMSHHYESWFRWWDLHPGTSWMDLPHTQGALTSPGHPGALQAGLGGYVGDHQLCAPPPHPHAHGWRRATRSFR

SEQ ID NO: 28079 - protein, 80 aa, Synthetic construct
FSKLLQPDMSHHYESWFRPTHPGAEDGSWWDLHPGTSWMDLPHPGALQAGLGGYVGDHQLCAPPPHPHAHGWRRATRSFR

SEQ ID NO: 28080 - protein, 80 aa, Synthetic construct
FSKLLQPDMSHHYESWFRPTHPGAEDGSWWDLHPGTSWMDLPHTGALQAGLGGYVGDHQLCAPPPHPHAHGWRRATRSFR

SEQ ID NO: 28081 - protein, 80 aa, Synthetic construct
FSKLLQPDMSHHYESWFRPTHPGAEDGSWWDLHPGTSWMDLPHTQGLQAGLGGYVGDHQLCAPPPHPHAHGWRRATRSFR

SEQ ID NO: 28082 - protein, 80 aa, Synthetic construct
FSKLLQPDMSHHYESWFRPTHPGAEDGSWWDLHPGTSWMDLPHTQGALAGLGGYVGDHQLCAPPPHPHAHGWRRATRSFR

SEQ ID NO: 28083 - protein, 80 aa, Synthetic construct
FSKLLQPDMSHHYESWFRPTHPGAEDGSWWDLHPGTSWMDLPHTQGALTSLGGYVGDHQLCAPPPHPHAHGWRRATRSFR

SEQ ID NO: 28084 - protein, 80 aa, Synthetic construct
PEFWGLSLINSGKRSTADYSLDNEPAQALTWRDSRAWEEQYQWDVEDMKVSGVHWGYEETKTFLAILSESGWRRATRSFR

SEQ ID NO: 28085 - protein, 80 aa, Synthetic construct
PSFWGLSLINSGKRSTADYSLDNEPAQALTWRDSRAWEEQYQWDVEDMKVSGVHWGYEETKTFLAILSESGWRRATRSFR

SEQ ID NO: 28086 - protein, 80 aa, Synthetic construct
PSNTGLSLINSGKRSTADYSLDNEPAQALTWRDSRAWEEQYQWDVEDMKVSGVHWGYEETKTFLAILSESGWRRATRSFR

SEQ ID NO: 28087 - protein, 80 aa, Synthetic construct
PSNTSESLINSGKRSTADYSLDNEPAQALTWRDSRAWEEQYQWDVEDMKVSGVHWGYEETKTFLAILSESGWRRATRSFR

SEQ ID NO: 28088 - protein, 80 aa, Synthetic construct
PSNTSEKEINSGKRSTADYSLDNEPAQALTWRDSRAWEEQYQWDVEDMKVSGVHWGYEETKTFLAILSESGWRRATRSFR

SEQ ID NO: 28089 - protein, 80 aa, Synthetic construct
PSNTSEKEQGPEFWGLSLYSLDNEPAQALTWRDSRAWEEQYQWDVEDMKVSGVHWGYEETKTFLAILSESGWRRATRSFR

SEQ ID NO: 28090 - protein, 80 aa, Synthetic construct
PSNTSEKEQGPEFWGLSLINLDNEPAQALTWRDSRAWEEQYQWDVEDMKVSGVHWGYEETKTFLAILSESGWRRATRSFR

SEQ ID NO: 28091 - protein, 80 aa, Synthetic construct
PSNTSEKEQGPEFWGLSLINSGKRSTADLTWRDSRAWEEQYQWDVEDMKVSGVHWGYEETKTFLAILSESGWRRATRSFR

SEQ ID NO: 28092 - protein, 80 aa, Synthetic construct
PSNTSEKEQGPEFWGLSLINSGKRSTADYSWRDSRAWEEQYQWDVEDMKVSGVHWGYEETKTFLAILSESGWRRATRSFR

SEQ ID NO: 28093 - protein, 80 aa, Synthetic construct
PSNTSEKEQGPEFWGLSLINSGKRSTADYSLDDSRAWEEQYQWDVEDMKVSGVHWGYEETKTFLAILSESGWRRATRSFR

SEQ ID NO: 28094 - protein, 80 aa, Synthetic construct
PSNTSEKEQGPEFWGLSLINSGKRSTADYSLDNERAWEEQYQWDVEDMKVSGVHWGYEETKTFLAILSESGWRRATRSFR

SEQ ID NO: 28095 - protein, 80 aa, Synthetic construct
PSNTSEKEQGPEFWGLSLINSGKRSTADYSLDNEPAQAEQYQWDVEDMKVSGVHWGYEETKTFLAILSESGWRRATRSFR

SEQ ID NO: 28096 - protein, 80 aa, Synthetic construct
PSNTSEKEQGPEFWGLSLINSGKRSTADYSLDNEPAQALTYQWDVEDMKVSGVHWGYEETKTFLAILSESGWRRATRSFR

SEQ ID NO: 28097 - protein, 80 aa, Synthetic construct
PSNTSEKEQGPEFWGLSLINSGKRSTADYSLDNEPAQALTWRWDVEDMKVSGVHWGYEETKTFLAILSESGWRRATRSFR

SEQ ID NO: 28098 - protein, 80 aa, Synthetic construct
QPSFEELPTDLSDSSSLCLCHEDPWEDEDPAGLPESFLLDGFLNSRVPGIDPWAPGLSLWALEPSREAGAGWRRATRSFR

SEQ ID NO: 28099 - protein, 80 aa, Synthetic construct
QPSFEEGGDPTLGPSSLCLCHEDPWEDEDPAGLPESFLLDGFLNSRVPGIDPWAPGLSLWALEPSREAGAGWRRATRSFR

SEQ ID NO: 28100 - protein, 80 aa, Synthetic construct
QPSFEEGGDPTLGPARLPTDLSDSSSLCLCHEDPWEDEDPAGLPESFLLDGFWAPGLSLWALEPSREAGAGWRRATRSFR

SEQ ID NO: 28101 - protein, 80 aa, Synthetic construct
YLNYGPYSSYAPHYDSTFANISKDDSDLIYSTYGIHEFLATCQDYPYVMADSLLDVLTKGGHSRTLQEMEGWRRATRSFR

SEQ ID NO: 28102 - protein, 80 aa, Synthetic construct
YLNYGPYSSYAPHYDSTFANISKDDSDLIYSTYGEDSDLPSDFSIHYVMADSLLDVLTKGGHSRTLQEMEGWRRATRSFR

SEQ ID NO: 28103 - protein, 80 aa, Synthetic construct
YLNYGPYSSYAPHYDSTFANISKDDSDLIYSTYGEDSDLPSDFSIHEFLATCQDDVLTKGGHSRTLQEMEGWRRATRSFR

SEQ ID NO: 28104 - protein, 80 aa, Synthetic construct
YLNYGPYSSYAPHYDSTFANISKDDSDLIYSTYGEDSDLPSDFSIHEFLATCQDYPLTKGGHSRTLQEMEGWRRATRSFR

SEQ ID NO: 28105 - protein, 80 aa, Synthetic construct
YLNYGPYSSYAPHYDSTFANISKDDSDLIYSTYGEDSDLPSDFSIHEFLATCQDYPYVKGGHSRTLQEMEGWRRATRSFR

SEQ ID NO: 28106 - protein, 80 aa, Synthetic construct
YLNYGPYSSYAPHYDSTFANISKDDSDLIYSTYGEDSDLPSDFSIHEFLATCQDYPYVMAGHSRTLQEMEGWRRATRSFR

SEQ ID NO: 28107 - protein, 80 aa, Synthetic construct
YLNYGPYSSYAPHYDSTFANISKDDSDLIYSTYGEDSDLPSDFSIHEFLATCQDYPYVMADSSRTLQEMEGWRRATRSFR

SEQ ID NO: 28108 - protein, 80 aa, Synthetic construct
YLNYGPYSSYAPHYDSTFANISKDDSDLIYSTYGEDSDLPSDFSIHEFLATCQDYPYVMADSLLTLQEMEGWRRATRSFR

SEQ ID NO: 28109 - protein, 80 aa, Synthetic construct
YLNYGPYSSYAPHYDSTFANISKDDSDLIYSTYGEDSDLPSDFSIHEFLATCQDYPYVMADSLLDVQEMEGWRRATRSFR

SEQ ID NO: 28110 - protein, 80 aa, Synthetic construct
YLNYGPYSSYAPHYDSTFANISKDDSDLIYSTYGEDSDLPSDFSIHEFLATCQDYPYVMADSLLDVLTMEGWRRATRSFR

SEQ ID NO: 28111 - protein, 80 aa, Synthetic construct
AWWFPEYPDSSFQCYSVHWDNNEREKMSPWDMEPIPEGTAFPDEVGAGVPVSQEELTALLYKPQEGEWGAGWRRATRSFR

SEQ ID NO: 28112 - protein, 80 aa, Synthetic construct
AWWFGTYPDSSFQCYSVHWDNNEREKMSPWDMEPIPEGTAFPDEVGAGVPVSQEELTALLYKPQEGEWGAGWRRATRSFR

SEQ ID NO: 28113 - protein, 80 aa, Synthetic construct
AWWFGTVEDSSFQCYSVHWDNNEREKMSPWDMEPIPEGTAFPDEVGAGVPVSQEELTALLYKPQEGEWGAGWRRATRSFR

SEQ ID NO: 28114 - protein, 80 aa, Synthetic construct
AWWFGTVESQQPFQYSVHWDNNEREKMSPWDMEPIPEGTAFPDEVGAGVPVSQEELTALLYKPQEGEWGAGWRRATRSFR

SEQ ID NO: 28115 - protein, 80 aa, Synthetic construct
AWWFGTVESQQPFQPEYPDSSFQCYSMSPWDMEPIPEGTAFPDEVGAGVPVSQEELTALLYKPQEGEWGAGWRRATRSFR

SEQ ID NO: 28116 - protein, 80 aa, Synthetic construct
AWWFGTVESQQPFQPEYPDSSFQCYSVHPWDMEPIPEGTAFPDEVGAGVPVSQEELTALLYKPQEGEWGAGWRRATRSFR

SEQ ID NO: 28117 - protein, 80 aa, Synthetic construct
AWWFGTVESQQPFQPEYPDSSFQCYSVHWDDMEPIPEGTAFPDEVGAGVPVSQEELTALLYKPQEGEWGAGWRRATRSFR

SEQ ID NO: 28118 - protein, 80 aa, Synthetic construct
AWWFGTVESQQPFQPEYPDSSFQCYSVHWDNNEREKMSPWDMDEVGAGVPVSQEELTALLYKPQEGEWGAGWRRATRSFR

SEQ ID NO: 28119 - protein, 80 aa, Synthetic construct
AWWFGTVESQQPFQPEYPDSSFQCYSVHWDNNEREKMSPWDMEPVGAGVPVSQEELTALLYKPQEGEWGAGWRRATRSFR

SEQ ID NO: 28120 - protein, 80 aa, Synthetic construct
AWWFGTVESQQPFQPEYPDSSFQCYSVHWDNNEREKMSPWDMEPIPAGVPVSQEELTALLYKPQEGEWGAGWRRATRSFR

SEQ ID NO: 28121 - protein, 80 aa, Synthetic construct
AWWFGTVESQQPFQPEYPDSSFQCYSVHWDNNEREKMSPWDMEPIPEGVPVSQEELTALLYKPQEGEWGAGWRRATRSFR

SEQ ID NO: 28122 - protein, 80 aa, Synthetic construct
AWWFGTVESQQPFQPEYPDSSFQCYSVHWDNNEREKMSPWDMEPIPEGTAFPQEELTALLYKPQEGEWGAGWRRATRSFR

SEQ ID NO: 28123 - protein, 80 aa, Synthetic construct
AWWFGTVESQQPFQPEYPDSSFQCYSVHWDNNEREKMSPWDMEPIPEGTAFPDEELTALLYKPQEGEWGAGWRRATRSFR

SEQ ID NO: 28124 - protein, 80 aa, Synthetic construct
AWWFGTVESQQPFQPEYPDSSFQCYSVHWDNNEREKMSPWDMEPIPEGTAFPDEVGTALLYKPQEGEWGAGWRRATRSFR

SEQ ID NO: 28125 - protein, 80 aa, Synthetic construct
AWWFGTVESQQPFQPEYPDSSFQCYSVHWDNNEREKMSPWDMEPIPEGTAFPDEVGAGLLYKPQEGEWGAGWRRATRSFR

SEQ ID NO: 28126 - protein, 80 aa, Synthetic construct
VSEEKSLMFIRPKKELGYVDIRTLADSVCRYDLNDMDAAWLELTNEEFKEMGMPELDEYTMERVLEEFEQGWRRATRSFR

SEQ ID NO: 28127 - protein, 80 aa, Synthetic construct
VSEEKSLMFIRPKKYIVSSGSEPPADSVCRYDLNDMDAAWLELTNEEFKEMGMPELDEYTMERVLEEFEQGWRRATRSFR

SEQ ID NO: 28128 - protein, 80 aa, Synthetic construct
VSEEKSLMFIRPKKYIVSSGSEPPELGYCRYDLNDMDAAWLELTNEEFKEMGMPELDEYTMERVLEEFEQGWRRATRSFR

SEQ ID NO: 28129 - protein, 80 aa, Synthetic construct
VSEEKSLMFIRPKKYIVSSGSEPPELGYVDYDLNDMDAAWLELTNEEFKEMGMPELDEYTMERVLEEFEQGWRRATRSFR

SEQ ID NO: 28130 - protein, 80 aa, Synthetic construct
VSEEKSLMFIRPKKYIVSSGSEPPELGYVDIRLNDMDAAWLELTNEEFKEMGMPELDEYTMERVLEEFEQGWRRATRSFR

SEQ ID NO: 28131 - protein, 80 aa, Synthetic construct
VSEEKSLMFIRPKKYIVSSGSEPPELGYVDIRTLDMDAAWLELTNEEFKEMGMPELDEYTMERVLEEFEQGWRRATRSFR

SEQ ID NO: 28132 - protein, 80 aa, Synthetic construct
VSEEKSLMFIRPKKYIVSSGSEPPELGYVDIRTLADSVCRYDLNDMEFKEMGMPELDEYTMERVLEEFEQGWRRATRSFR

SEQ ID NO: 28133 - protein, 80 aa, Synthetic construct
VSEEKSLMFIRPKKYIVSSGSEPPELGYVDIRTLADSVCRYDLNDMDAAWMGMPELDEYTMERVLEEFEQGWRRATRSFR

SEQ ID NO: 28134 - protein, 80 aa, Synthetic construct
VSEEKSLMFIRPKKYIVSSGSEPPELGYVDIRTLADSVCRYDLNDMDAAWLEMPELDEYTMERVLEEFEQGWRRATRSFR

SEQ ID NO: 28135 - protein, 80 aa, Synthetic construct
VSEEKSLMFIRPKKYIVSSGSEPPELGYVDIRTLADSVCRYDLNDMDAAWLELTELDEYTMERVLEEFEQGWRRATRSFR

SEQ ID NO: 28136 - protein, 80 aa, Synthetic construct
VSEEKSLMFIRPKKYIVSSGSEPPELGYVDIRTLADSVCRYDLNDMDAAWLELTNEEFYTMERVLEEFEQGWRRATRSFR

SEQ ID NO: 28137 - protein, 80 aa, Synthetic construct
VSEEKSLMFIRPKKYIVSSGSEPPELGYVDIRTLADSVCRYDLNDMDAAWLELTNEEFKEMERVLEEFEQGWRRATRSFR

SEQ ID NO: 28138 - protein, 80 aa, Synthetic construct
VSEEKSLMFIRPKKYIVSSGSEPPELGYVDIRTLADSVCRYDLNDMDAAWLELTNEEFKEMGRVLEEFEQGWRRATRSFR

SEQ ID NO: 28139 - protein, 80 aa, Synthetic construct
VSEEKSLMFIRPKKYIVSSGSEPPELGYVDIRTLADSVCRYDLNDMDAAWLELTNEEFKEMGMPLEEFEQGWRRATRSFR

SEQ ID NO: 28140 - protein, 80 aa, Synthetic construct
VSEEKSLMFIRPKKYIVSSGSEPPELGYVDIRTLADSVCRYDLNDMDAAWLELTNEEFKEMGMPELEFEQGWRRATRSFR

SEQ ID NO: 28141 - protein, 80 aa, Synthetic construct
VSEEKSLMFIRPKKYIVSSGSEPPELGYVDIRTLADSVCRYDLNDMDAAWLELTNEEFKEMGMPELDEYTGWRRATRSFR

SEQ ID NO: 28142 - protein, 80 aa, Synthetic construct
RPKKYIVSSGIRTLADSVCRYDLNDMDAAWLELTNEEFKEMGMPELDEYTMERVLEEFEQRCYDNMNHAIGWRRATRSFR

SEQ ID NO: 28143 - protein, 80 aa, Synthetic construct
RPKKYIVSSGSEPPELGYVDIRTLADSVCRYDLNDMDAAWMGMPELDEYTMERVLEEFEQRCYDNMNHAIGWRRATRSFR

SEQ ID NO: 28144 - protein, 80 aa, Synthetic construct
RPKKYIVSSGSEPPELGYVDIRTLADSVCRYDLNDMDAAWLEMPELDEYTMERVLEEFEQRCYDNMNHAIGWRRATRSFR

SEQ ID NO: 28145 - protein, 80 aa, Synthetic construct
RPKKYIVSSGSEPPELGYVDIRTLADSVCRYDLNDMDAAWLELTELDEYTMERVLEEFEQRCYDNMNHAIGWRRATRSFR

SEQ ID NO: 28146 - protein, 80 aa, Synthetic construct
RPKKYIVSSGSEPPELGYVDIRTLADSVCRYDLNDMDAAWLELTNEEFYTMERVLEEFEQRCYDNMNHAIGWRRATRSFR

SEQ ID NO: 28147 - protein, 80 aa, Synthetic construct
RPKKYIVSSGSEPPELGYVDIRTLADSVCRYDLNDMDAAWLELTNEEFKEMERVLEEFEQRCYDNMNHAIGWRRATRSFR

SEQ ID NO: 28148 - protein, 80 aa, Synthetic construct
RPKKYIVSSGSEPPELGYVDIRTLADSVCRYDLNDMDAAWLELTNEEFKEMGRVLEEFEQRCYDNMNHAIGWRRATRSFR

SEQ ID NO: 28149 - protein, 80 aa, Synthetic construct
RPKKYIVSSGSEPPELGYVDIRTLADSVCRYDLNDMDAAWLELTNEEFKEMGMPELDEYTMERVLEEFAIGWRRATRSFR

SEQ ID NO: 28150 - protein, 80 aa, Synthetic construct
YDLNDMDAAWLELTELDEYTMERVLEEFEQRCYDNMNHAIETEEGLGIEYDEDVVCDVCQSPDGEDGNEMGWRRATRSFR

SEQ ID NO: 28151 - protein, 80 aa, Synthetic construct
YDLNDMDAAWLELTNEEFYTMERVLEEFEQRCYDNMNHAIETEEGLGIEYDEDVVCDVCQSPDGEDGNEMGWRRATRSFR

SEQ ID NO: 28152 - protein, 80 aa, Synthetic construct
YDLNDMDAAWLELTNEEFKEMERVLEEFEQRCYDNMNHAIETEEGLGIEYDEDVVCDVCQSPDGEDGNEMGWRRATRSFR

SEQ ID NO: 28153 - protein, 80 aa, Synthetic construct
YDLNDMDAAWLELTNEEFKEMGMPELDEYTMEYDNMNHAIETEEGLGIEYDEDVVCDVCQSPDGEDGNEMGWRRATRSFR

SEQ ID NO: 28154 - protein, 80 aa, Synthetic construct
PDDYYILAVQVPAGAEAIPEPVVRILPPLEGPPAQASPSSTMLGEGSQPDWPGGSRYDLDEIDAYWLELIGWRRATRSFR

SEQ ID NO: 28155 - protein, 80 aa, Synthetic construct
PDDYYILADPWRQEWEKGVQVPAGAEAIPEPVVRILPPLEGPPAQASPSSWPGGSRYDLDEIDAYWLELIGWRRATRSFR

SEQ ID NO: 28156 - protein, 80 aa, Synthetic construct
WADTATVIQDYNYCREDEEIYKEFFEVANDVIPNLLKEAAGEQSQGTQSQGSALQDPECFAHLLRFYDGIGWRRATRSFR

SEQ ID NO: 28157 - protein, 80 aa, Synthetic construct
WADTATVIQDYNYCREDEEIYKEFFEVANDVIPNLLKEAASLQSQGTQSQGSALQDPECFAHLLRFYDGIGWRRATRSFR

SEQ ID NO: 28158 - protein, 80 aa, Synthetic construct
WADTATVIQDYNYCREDEEIYKEFFEVANDVIPNLLKEAASLLEQGTQSQGSALQDPECFAHLLRFYDGIGWRRATRSFR

SEQ ID NO: 28159 - protein, 80 aa, Synthetic construct
WADTATVIQDYNYCREDEEIYKEFFEVANDVIPNLLKEAASLLEAGEESQGSALQDPECFAHLLRFYDGIGWRRATRSFR

SEQ ID NO: 28160 - protein, 80 aa, Synthetic construct
WADTATVIQDYNYCREDEEIYKEFFEVANDVIPNLLKEAASLLEAGEERPGSALQDPECFAHLLRFYDGIGWRRATRSFR

SEQ ID NO: 28161 - protein, 80 aa, Synthetic construct
WADTATVIQDYNYCREDEEIYKEFFEVANDVIPNLLKEAASLLEAGEERPGEALQDPECFAHLLRFYDGIGWRRATRSFR

SEQ ID NO: 28162 - protein, 80 aa, Synthetic construct
WADTATVIQDYNYCREDEEIYKEFFEVANDVIPNLLKEAASLLEAGEERPGEQSQGPECFAHLLRFYDGIGWRRATRSFR

SEQ ID NO: 28163 - protein, 80 aa, Synthetic construct
TYQYPRAILSVDLSGENLSDVDFLDDSSTESLLLSGDEYNQDFDSTNFNEIVRCICEMDEENGFMIQCEEGWRRATRSFR

SEQ ID NO: 28164 - protein, 80 aa, Synthetic construct
LQLEYPDSLFQCYNVCWDNGDTEKMSPWDMELIPNNAVFPEELGRSLIYKPLDGEWGTNPRDEECERIVAGWRRATRSFR

SEQ ID NO: 28165 - protein, 80 aa, Synthetic construct
LQLEYPDSLFQCYNVCWDNGDTEKMSPWDMELIPNNAVFPEELGTSLIYKPLDGEWGTNPRDEECERIVAGWRRATRSFR

SEQ ID NO: 28166 - protein, 80 aa, Synthetic construct
LQLEYPDSLFQCYNVCWDNGDTEKMSPWDMELIPNNAVFPEELGTSVPLTDGECRSLIYKPLDGEWRIVAGWRRATRSFR

SEQ ID NO: 28167 - protein, 80 aa, Synthetic construct
PDLPELDLSELDVNDLDTDSFLGGLKWCSDQSEIISNQKIDEENEANLLAVLTETLDSLPVDEDGLPSFDGWRRATRSFR

SEQ ID NO: 28168 - protein, 80 aa, Synthetic construct
PDLPELDLSELDVNDLDTDSFLGGLKWCSDQSEIISNQYNNEPSNIFEKIDEENEANLLAVLTEGLPSFDGWRRATRSFR

SEQ ID NO: 28169 - protein, 80 aa, Synthetic construct
DYLPLTALVDGQIFCLHGGLSPSIDTLDHIRAGPMCDLLWSDPDDRGGWGISPRGAGYTFGQDISETFNHGWRRATRSFR

SEQ ID NO: 28170 - protein, 80 aa, Synthetic construct
DYLPLTALVDGQIFCLHGGLSPSIDTLDHIRALDRLQELWSDPDDRGGWGISPRGAGYTFGQDISETFNHGWRRATRSFR

SEQ ID NO: 28171 - protein, 80 aa, Synthetic construct
DYLPLTALVDGQIFCLHGGLSPSIDTLDHIRALDRLQEVPHEGPMCDLLWSDPDDRGGWGISPRGAGYTFGWRRATRSFR

SEQ ID NO: 28172 - protein, 80 aa, Synthetic construct
SLAGWLYNVQQGFAPTLDDDKPWYSIFPIDNEDLVYGRWEDNIIWDAQAMPRLLEPPVLALDPNDENLILGWRRATRSFR

SEQ ID NO: 28173 - protein, 80 aa, Synthetic construct
SLAGWLPSVQQGFAPTLDDDKPWYSIFPIDNEDLVYGRWEDNIIWDAQAMPRLLEPPVLALDPNDENLILGWRRATRSFR

SEQ ID NO: 28174 - protein, 80 aa, Synthetic construct
SLAGWLPSIKTRNVMAYNVQQGFAPTLDDDKPWYSIFPIDNEDLVYGRWEDNIIWDPVLALDPNDENLILGWRRATRSFR

SEQ ID NO: 28175 - protein, 80 aa, Synthetic construct
SLAGWLPSIKTRNVMAYNVQQGFAPTLDDDKPWYSIFPIDNEDLVYGRWEDNIIWDAQLALDPNDENLILGWRRATRSFR

SEQ ID NO: 28176 - protein, 80 aa, Synthetic construct
SLAGWLPSIKTRNVMAYNVQQGFAPTLDDDKPWYSIFPIDNEDLVYGRWEDNIIWDAQAMLDPNDENLILGWRRATRSFR

SEQ ID NO: 28177 - protein, 80 aa, Synthetic construct
RLDDLPWDSLLFQESSSGGGAEPSFGSGLPLPPGGALADIYRELYAFFGDSLATRFGTGQPAPTAPRPPGGWRRATRSFR

SEQ ID NO: 28178 - protein, 80 aa, Synthetic construct
AELYSLLQEECKYSETATAIAYEQHGFFEQAQESYEKAMDKAKKEHERSNASPAIFPEYQLWEDHWIRCSGWRRATRSFR

SEQ ID NO: 28179 - protein, 80 aa, Synthetic construct
AELYSLLQEEDMWAGLWQKRCKYSHGFFEQAQESYEKAMDKAKKEHERSNASPAIFPEYQLWEDHWIRCSGWRRATRSFR

SEQ ID NO: 28180 - protein, 80 aa, Synthetic construct
AELYSLLQEEDMWAGLWQKRCKYSETFFEQAQESYEKAMDKAKKEHERSNASPAIFPEYQLWEDHWIRCSGWRRATRSFR

SEQ ID NO: 28181 - protein, 80 aa, Synthetic construct
AELYSLLQEEDMWAGLWQKRCKYSETATAIAQESYEKAMDKAKKEHERSNASPAIFPEYQLWEDHWIRCSGWRRATRSFR

SEQ ID NO: 28182 - protein, 80 aa, Synthetic construct
AELYSLLQEEDMWAGLWQKRCKYSETATAIAYESYEKAMDKAKKEHERSNASPAIFPEYQLWEDHWIRCSGWRRATRSFR

SEQ ID NO: 28183 - protein, 80 aa, Synthetic construct
AELYSLLQEEDMWAGLWQKRCKYSETATAIAYEQYEKAMDKAKKEHERSNASPAIFPEYQLWEDHWIRCSGWRRATRSFR

SEQ ID NO: 28184 - protein, 80 aa, Synthetic construct
AELYSLLQEEDMWAGLWQKRCKYSETATAIAYEQHGKAMDKAKKEHERSNASPAIFPEYQLWEDHWIRCSGWRRATRSFR

SEQ ID NO: 28185 - protein, 80 aa, Synthetic construct
AELYSLLQEEDMWAGLWQKRCKYSETATAIAYEQHGFFMDKAKKEHERSNASPAIFPEYQLWEDHWIRCSGWRRATRSFR

SEQ ID NO: 28186 - protein, 80 aa, Synthetic construct
AELYSLLQEEDMWAGLWQKRCKYSETATAIAYEQHGFFEQKAKKEHERSNASPAIFPEYQLWEDHWIRCSGWRRATRSFR

SEQ ID NO: 28187 - protein, 80 aa, Synthetic construct
AELYSLLQEEDMWAGLWQKRCKYSETATAIAYEQHGFFEQAQESYEERSNASPAIFPEYQLWEDHWIRCSGWRRATRSFR

SEQ ID NO: 28188 - protein, 80 aa, Synthetic construct
AELYSLLQEEDMWAGLWQKRCKYSETATAIAYEQHGFFEQAQESYEKASNASPAIFPEYQLWEDHWIRCSGWRRATRSFR

SEQ ID NO: 28189 - protein, 80 aa, Synthetic construct
AELYSLLQEEDMWAGLWQKRCKYSETATAIAYEQHGFFEQAQESYEKAMDASPAIFPEYQLWEDHWIRCSGWRRATRSFR

SEQ ID NO: 28190 - protein, 80 aa, Synthetic construct
AELYSLLQEEDMWAGLWQKRCKYSETATAIAYEQHGFFEQAQESYEKAMDKAKKIFPEYQLWEDHWIRCSGWRRATRSFR

SEQ ID NO: 28191 - protein, 80 aa, Synthetic construct
AELYSLLQEEDMWAGLWQKRCKYSETATAIAYEQHGFFEQAQESYEKAMDKAKKEHPEYQLWEDHWIRCSGWRRATRSFR

SEQ ID NO: 28192 - protein, 80 aa, Synthetic construct
AELYSLLQEEDMWAGLWQKRCKYSETATAIAYEQHGFFEQAQESYEKAMDKAKKEHERYQLWEDHWIRCSGWRRATRSFR

SEQ ID NO: 28193 - protein, 80 aa, Synthetic construct
FKDPAGVQTEAGVADLTWVGERGILVASDSGAVELWELDENETLIVSKFCKYEHDDIVSTVSVLSSGTQAGWRRATRSFR

SEQ ID NO: 28194 - protein, 80 aa, Synthetic construct
FKDPCAVQTEAGVADLTWVGERGILVASDSGAVELWELDENETLIVSKFCKYEHDDIVSTVSVLSSGTQAGWRRATRSFR

SEQ ID NO: 28195 - protein, 80 aa, Synthetic construct
FKDPCAAPNEGFCSDLTWVGERGILVASDSGAVELWELDENETLIVSKFCKYEHDDIVSTVSVLSSGTQAGWRRATRSFR

SEQ ID NO: 28196 - protein, 80 aa, Synthetic construct
FKDPCAAPNEGFCSAGTWVGERGILVASDSGAVELWELDENETLIVSKFCKYEHDDIVSTVSVLSSGTQAGWRRATRSFR

SEQ ID NO: 28197 - protein, 80 aa, Synthetic construct
FKDPCAAPNEGFCSAGVQTEAGVADLTWVGERGILVASDSGAVELWELDENETLIVSKFCKYEHDDIVQAGWRRATRSFR

SEQ ID NO: 28198 - protein, 80 aa, Synthetic construct
FKDPCAAPNEGFCSAGVQTEAGVADLTWVGERGILVASDSGAVELWELDENETLIVSKFCKYEHDDIVSTGWRRATRSFR

SEQ ID NO: 28199 - protein, 9 aa, Synthetic construct
WFVGVDSLD

SEQ ID NO: 28200 - protein, 9 aa, Synthetic construct
AAVGVDSAD

SEQ ID NO: 28201 - protein, 9 aa, Synthetic construct
KEFDLDALL

SEQ ID NO: 28202 - protein, 9 aa, Synthetic construct
KAFALAALL

SEQ ID NO: 28203 - protein, 10 aa, Synthetic construct
SDSSSDSSSD

SEQ ID NO: 28204 - protein, 10 aa, Synthetic construct
ADAAADAAAD

SEQ ID NO: 28205 - protein, 6 aa, Synthetic construct
FWRPWP

SEQ ID NO: 28206 - protein, 6 aa, Synthetic construct
IKEEEP

SEQ ID NO: 28207 - protein, 15 aa, Synthetic construct
PPLSQETFSDLWKLL

SEQ ID NO: 28208 - protein, 15 aa, Synthetic construct
KLLPENNVLSPLPSQ

SEQ ID NO: 28209 - protein, 15 aa, Synthetic construct
MDDLMLSPDDIEQWF

SEQ ID NO: 28210 - protein, 15 aa, Synthetic construct
FTEDPGPDEAPRMPE

SEQ ID NO: 28211 - protein, 95 aa, Synthetic construct
EEPQSDPSVEPPLSQETFSDLWKLLPENNVLSPLPSQAMDDIMLSPDDIEQWFTEDPGPDEAPRMPEAAPPVAPAPAAPTPAAPAPAPSWPLSSS

SEQ ID NO: 28212 - protein, 4 aa, Synthetic construct
WRPW

SEQ ID NO: 28213 - protein, 4 aa, Synthetic construct
IKEE

SEQ ID NO: 28214 - protein, 80 aa, Synthetic construct
TEDFAGFTQSDLNGKTNPEVMVVESDLSDDGKASLVSEEEEDEEEDKATPRRSRSRRSSIGLRVAFQFPTKKLANKPDKN

SEQ ID NO: 28215 - protein, 80 aa, Synthetic construct
DLNGKTNPEVMVVESDLSDDGKASLVSEEEEDEEEDKATPRRSRSRRSSIGLRVAFQFPTKKLANKPDKNSSSEQLFSSA

SEQ ID NO: 28216 - protein, 80 aa, Synthetic construct
KNKPNKKARVLSKKEERLKKHIKKLQKRALQFQGKVGLPKARRPWESDMRPEAEGDSEGEESEYFPTEEEEEEEDDEVEG

SEQ ID NO: 28217 - protein, 80 aa, Synthetic construct
QPPLKLDTSSEKLEFLQLFGLTTQQQKEELVAQKRRKRRRMLRERSPSPPTIQSKRQTPSPRLALSTRYSPDEMNNSPNF

SEQ ID NO: 28218 - protein, 80 aa, Synthetic construct
PDEMNNSPNFEEKKKFLTIFNLTHISAEKRKDKERLVEMLRAMKQKALSAAVADSLTNSPRDSPAVSLSEPATQQASLDV

SEQ ID NO: 28219 - protein, 80 aa, Synthetic construct; identical to SEQ ID NO: 10639

SEQ ID NO: 28220 - protein, 80 aa, Synthetic construct
MSDLENMTSAERITILQEKLQEIRKHYLSLKSEVASIDRRRKRLKKKERESAATSSSSSSPSSSSITAAVMLTLAEPSMS

SEQ ID NO: 28221 - protein, 80 aa, Synthetic construct; identical to SEQ ID NO: 10836

SEQ ID NO: 28222 - protein, 80 aa, Synthetic construct
KEQVETVPQATVKTGLQKGASEISDSCKPLKKRSRASTDVEMTSSAYRDTSDSDSRGLSDLQVGFGKQVDSPSATADADV

SEQ ID NO: 28223 - protein, 80 aa, Synthetic construct
PTKGNGEPATKLPPPETPDACLKLASRAAFQGAMKTKVLPPRKGRGLKLEAIVQKITSPSLKKFACKAPGASPGNPLSPS

SEQ ID NO: 28224 - protein, 80 aa, Synthetic construct
CLKLASRAAFQGAMKTKVLPPRKGRGLKLEAIVQKITSPSLKKFACKAPGASPGNPLSPSLSDKDRGLKGAGGSPVGVEE

SEQ ID NO: 28225 - protein, 80 aa, Synthetic construct
QGAMKTKVLPPRKGRGLKLEAIVQKITSPSLKKFACKAPGASPGNPLSPSLSDKDRGLKGAGGSPVGVEEGLVNVGTGQK

SEQ ID NO: 28226 - protein, 80 aa, Synthetic construct
PRKGRGLKLEAIVQKITSPSLKKFACKAPGASPGNPLSPSLSDKDRGLKGAGGSPVGVEEGLVNVGTGQKLPTSGADPLC

SEQ ID NO: 28227 - protein, 80 aa, Synthetic construct; identical to SEQ ID NO: 11341

SEQ ID NO: 28228 - protein, 80 aa, Synthetic construct; identical to SEQ ID NO: 11361

SEQ ID NO: 28229 - protein, 80 aa, Synthetic construct; identical to SEQ ID NO: 11776

SEQ ID NO: 28230 - protein, 80 aa, Synthetic construct
EYLEPLATLQENMQIRTKVAGIYRELCLESVKNKYECEIQASRQHCESEKLLLYDTVQSELEEKIRRLEEDRHSIDITSE

SEQ ID NO: 28231 - protein, 80 aa, Synthetic construct
KPKTPQAPKTLAGSCGKFAPFEIKEHMVLAPRRRTAFHPDLCSQLDQLLQQQSGEFSFLKDLKGRQPLRSGPTHVSTRNA

SEQ ID NO: 28232 - protein, 80 aa, Synthetic construct
LPPPPAADIQPPPIRRAKTKEGKGPGHKRRSKSPRVPDGRKKLRGKKMAPLKIKLGLLGGKRKKGGSYVFQSDEGPEPEA

SEQ ID NO: 28233 - protein, 80 aa, Synthetic construct
EGKGPGHKRRSKSPRVPDGRKKLRGKKMAPLKIKLGLLGGKRKKGGSYVFQSDEGPEPEAEESDLDSGSVHSASGRPDGP

SEQ ID NO: 28234 - protein, 80 aa, Synthetic construct
SKSPRVPDGRKKLRGKKMAPLKIKLGLLGGKRKKGGSYVFQSDEGPEPEAEESDLDSGSVHSASGRPDGPVRTKKLKRGR

SEQ ID NO: 28235 - protein, 80 aa, Synthetic construct
KKLRGKKMAPLKIKLGLLGGKRKKGGSYVFQSDEGPEPEAEESDLDSGSVHSASGRPDGPVRTKKLKRGRPGRKKKKVLG

SEQ ID NO: 28236 - protein, 80 aa, Synthetic construct
PTTVDSPLQKRSFAELSMVGQASISGSEDITTSPQLSKEDALNLSVPRQRRRRRRKIEIEAERAAKRRNLMEMVAQLRES

SEQ ID NO: 28237 - protein, 80 aa, Synthetic construct
RSFAELSMVGQASISGSEDITTSPQLSKEDALNLSVPRQRRRRRRKIEIEAERAAKRRNLMEMVAQLRESQVVSENGQEK

SEQ ID NO: 28238 - protein, 80 aa, Synthetic construct; identical to SEQ ID NO: 7596

SEQ ID NO: 28239 - protein, 80 aa, Synthetic construct
TSLVSALDSMCSALSKLNAEVACVAVHDESAFVVGTEKGRMFLNARKELQSDFLRFCRGPPWKDPEAEHPKKVQRGEGGG

SEQ ID NO: 28240 - protein, 80 aa, Synthetic construct; identical to SEQ ID NO: 7678

SEQ ID NO: 28241 - protein, 80 aa, Synthetic construct; identical to SEQ ID NO: 9333

SEQ ID NO: 28242 - protein, 80 aa, Synthetic construct
CTDETLLSAIASALHTSTMPITGQLSAAVEKNPGVWLNTTQPLCKAFMVTDEDIRKQEELVQQVRKRLEEALMADMLAHV

SEQ ID NO: 28243 - protein, 80 aa, Synthetic construct
ASALHTSTMPITGQLSAAVEKNPGVWLNTTQPLCKAFMVTDEDIRKQEELVQQVRKRLEEALMADMLAHVEELARDGEAP

SEQ ID NO: 28244 - protein, 80 aa, Synthetic construct
ITGQLSAAVEKNPGVWLNTTQPLCKAFMVTDEDIRKQEELVQQVRKRLEEALMADMLAHVEELARDGEAPLDKACAEDDD

SEQ ID NO: 28245 - protein, 80 aa, Synthetic construct
QPLCKAFMVTDEDIRKQEELVQQVRKRLEEALMADMLAHVEELARDGEAPLDKACAEDDDEEDEEEEEEEPDPDPEMEHV

SEQ ID NO: 28246 - protein, 80 aa, Synthetic construct
LEGLRSQTQFEEMRSSYIRELIKAIGLRQKGVVSSSQRFYQLTKLLDNLHDLVKQLHLYCLNTFIQSRALSVEFPEMMSE

SEQ ID NO: 28247 - protein, 80 aa, Synthetic construct; identical to SEQ ID NO: 9846

SEQ ID NO: 28248 - protein, 80 aa, Synthetic construct; identical to SEQ ID NO: 9850

SEQ ID NO: 28249 - protein, 80 aa, Synthetic construct; identical to SEQ ID NO: 9851

SEQ ID NO: 28250 - protein, 80 aa, Synthetic construct
PVTPATSQDQPLDLSMGSRSRASGTKLTEPRKNHVFGGKKGSNVESRPASDGSLQHARPTPFFMDPIYRVEKRKLTDPLE

SEQ ID NO: 28251 - protein, 80 aa, Synthetic construct
LSHSQDIKSIPKRDSSKDLPSPDSRNCPAVTLTSPAKTKILPPRKGRGLKLEAIVQKITSPNIRRSASSNSAEAGGDTVT

SEQ ID NO: 28252 - protein, 80 aa, Synthetic construct
LSSGQLKSPSLSQSQASRVLGQSSSKPAAAATGPPPGNTSSTQKWKICTICNELFPENVYSVHFEKEHKAEKVPAVANYI

SEQ ID NO: 28253 - protein, 80 aa, Synthetic construct
SLYEVCAKCGNLFTNLDSLNAHNAIHRRVEASRTRAPAEEGAEGPSDTKQFFLQCLNLRPSAAGDSCPGTQAGRRVAELD

SEQ ID NO: 28254 - protein, 80 aa, Synthetic construct
ASRTRAPAEEGAEGPSDTKQFFLQCLNLRPSAAGDSCPGTQAGRRVAELDPVNSYQAWQLATRGKVAEPAEYLKYGAWDE

SEQ ID NO: 28255 - protein, 80 aa, Synthetic construct
SRRKQAKPQHFQSDPEVASLPRRDGDTEKGQPSRPTKSKDAHVCGRCCAEFFELSDLLLHKKNCTKNQLVLIVNENPASP

SEQ ID NO: 28256 - protein, 80 aa, Synthetic construct
DISDEDEEDGEVFKTPRAPPAPPKPEPGEAPGASQCMPLKLRFKRRWSEDCRLEGGGGPAGGFEDEGEDKKVRGEGPGEA

SEQ ID NO: 28257 - protein, 80 aa, Synthetic construct
PTTTQEPLVGSQKRKARKTKITHLVRTADGRVSPAGGTLDDKPKEQLQRSLPKATETDCNDKCSHNTEVGETRSSTPEMP

SEQ ID NO: 28258 - protein, 80 aa, Synthetic construct; identical to SEQ ID NO: 6301

SEQ ID NO: 28259 - protein, 80 aa, Synthetic construct; identical to SEQ ID NO: 6302

SEQ ID NO: 28260 - protein, 80 aa, Synthetic construct; identical to SEQ ID NO: 6304

SEQ ID NO: 28261 - protein, 80 aa, Synthetic construct
TKDPDVRLGLNQHYPSFKPPPFQYHHRNPMGIGVTATNFTTHNIPQTFTTAIRCTKCGKGVDNMPELHKHILACASASDK

SEQ ID NO: 28262 - protein, 80 aa, Synthetic construct
EEPQPPAEQAQATQNVYVPSTEPEEEGEADDVYIMDISSNISENLNYYIDGKIQTNNNTSNCDVIEMESASADLYGINCL

SEQ ID NO: 28263 - protein, 80 aa, Synthetic construct; identical to SEQ ID NO: 7113

SEQ ID NO: 28264 - protein, 80 aa, Synthetic construct; identical to SEQ ID NO: 7114

SEQ ID NO: 28265 - protein, 80 aa, Synthetic construct; identical to SEQ ID NO: 7115

SEQ ID NO: 28266 - protein, 80 aa, Synthetic construct
QASGLSSTGSEVHQEDICSNSSRDSPPECLSPFGRPTMSQFDMDRLCDEHLRAKRARVENIIRGMSHSPSVALRGNENER

SEQ ID NO: 28267 - protein, 80 aa, Synthetic construct
EVHQEDICSNSSRDSPPECLSPFGRPTMSQFDMDRLCDEHLRAKRARVENIIRGMSHSPSVALRGNENEREMAPQSVSPR

SEQ ID NO: 28268 - protein, 80 aa, Synthetic construct
CETNLRRCISEQHRFVCDTCDKAFPMLCSLALHKQTHVAADQGQEKPQATPLPGDALDQKGFLALLGLQHTKDVRPAPAE

SEQ ID NO: 28269 - protein, 80 aa, Synthetic construct
EQHRFVCDTCDKAFPMLCSLALHKQTHVAADQGQEKPQATPLPGDALDQKGFLALLGLQHTKDVRPAPAEEPLPDDNQAI

SEQ ID NO: 28270 - protein, 80 aa, Synthetic construct
DKAFPMLCSLALHKQTHVAADQGQEKPQATPLPGDALDQKGFLALLGLQHTKDVRPAPAEEPLPDDNQAIQLQTLKCQLP

SEQ ID NO: 28271 - protein, 80 aa, Synthetic construct
ALHKQTHVAADQGQEKPQATPLPGDALDQKGFLALLGLQHTKDVRPAPAEEPLPDDNQAIQLQTLKCQLPQDPGCTNLLS

SEQ ID NO: 28272 - protein, 80 aa, Synthetic construct
DQGQEKPQATPLPGDALDQKGFLALLGLQHTKDVRPAPAEEPLPDDNQAIQLQTLKCQLPQDPGCTNLLSLSPFEAASLG

SEQ ID NO: 28273 - protein, 80 aa, Synthetic construct
QILKMAASAPPQISLPPFSKAPAAPLQAIFKHMPPLKPKPLVTPRTVVATSTPPPLINAQQASPGCISPSLPPPPLKLLK

SEQ ID NO: 28274 - protein, 80 aa, Synthetic construct; identical to SEQ ID NO: 9518

SEQ ID NO: 28275 - protein, 80 aa, Synthetic construct
PAFARQAAQEPSAVPRAGPLTVNTEAQQLLREFEEATGEAGWGAGEGRLGHKRKQPLPKRVAKVPRPPSTLLPTPEEQGE

SEQ ID NO: 28276 - protein, 80 aa, Synthetic construct
DPTCPVCNKKFSRVASLKAHIMLHEKEENLICSECGDEFTLQSQLAVHMEEHRQELAGTRQHACKACKKEFETSSELKEH

SEQ ID NO: 28277 - protein, 80 aa, Synthetic construct
DLGTAEGTRCTDPPAGKPAMAPKRKGGLKLNAICAKLSRQVVVEKRADAGSHTEGSPSQPRDQERSGPESGAARAPRSEE

SEQ ID NO: 28278 - protein, 80 aa, Synthetic construct
APKRKGGLKLNAICAKLSRQVVVEKRADAGSHTEGSPSQPRDQERSGPESGAARAPRSEEDKRRAVIEKWVNGEYSEEPA

SEQ ID NO: 28279 - protein, 80 aa, Synthetic construct
TLPIRQTASIFKQPVTKVTNHPSNKVKSDPQRMNEQPRQLFWEKRLQGLSASDVTEQIIKTMELPKGLQGVGPGSNDETL

SEQ ID NO: 28280 - protein, 80 aa, Synthetic construct
LSAVASALHTSSAPITGQVSAAVEKNPAVWLNTSQPLCKAFIVTDEDIRKQEERVQQVRKKLEEALMADILSRAADTEEM

SEQ ID NO: 28281 - protein, 80 aa, Synthetic construct; identical to SEQ ID NO: 6786

SEQ ID NO: 28282 - protein, 80 aa, Synthetic construct; identical to SEQ ID NO: 6787

SEQ ID NO: 28283 - protein, 80 aa, Synthetic construct; identical to SEQ ID NO: 6893

SEQ ID NO: 28284 - protein, 80 aa, Synthetic construct; identical to SEQ ID NO: 8908

SEQ ID NO: 28285 - protein, 80 aa, Synthetic construct; identical to SEQ ID NO: 8909

SEQ ID NO: 28286 - protein, 80 aa, Synthetic construct
PSAPASGEEQPLDLSIGSRARASQNGGGREPRKNHVYGERKLGAGEGLPQVCPARMPQQPPLHYAKPSPFFMDPIYSRVE

SEQ ID NO: 28287 - protein, 80 aa, Synthetic construct
PLDLSIGSRARASQNGGGREPRKNHVYGERKLGAGEGLPQVCPARMPQQPPLHYAKPSPFFMDPIYSRVEKRKVTDPVGA

SEQ ID NO: 28288 - protein, 80 aa, Synthetic construct; identical to SEQ ID NO: 9203

SEQ ID NO: 28289 - protein, 80 aa, Synthetic construct
EASSPRSSSRMEERLKAANLEMFKGKGIEERQQLIKQLRDELRLEEARLVLLKKLRQSQLQKENVVQKTPVVQNAASIVQ

SEQ ID NO: 28290 - protein, 80 aa, Synthetic construct
EMFKGKGIEERQQLIKQLRDELRLEEARLVLLKKLRQSQLQKENVVQKTPVVQNAASIVQPSPAHVGQQGLSKLPSRPGA

SEQ ID NO: 28291 - protein, 80 aa, Synthetic construct
EKLAMSQDKNQLDSPQTGQCPDQAHRTSLVKQIEFNFPSQAITSPRATVSKEQEKFGKVPFDYASFDAQVFGKRPLIQTV

SEQ ID NO: 28292 - protein, 80 aa, Synthetic construct
QLDSPQTGQCPDQAHRTSLVKQIEFNFPSQAITSPRATVSKEQEKFGKVPFDYASFDAQVFGKRPLIQTVQGRKTPPFPE

SEQ ID NO: 28293 - protein, 80 aa, Synthetic construct
KQIEFNFPSQAITSPRATVSKEQEKFGKVPFDYASFDAQVFGKRPLIQTVQGRKTPPFPESKHFPNPVKFPNRLPSAGAH

SEQ ID NO: 28294 - protein, 80 aa, Synthetic construct
AITSPRATVSKEQEKFGKVPFDYASFDAQVFGKRPLIQTVQGRKTPPFPESKHFPNPVKFPNRLPSAGAHTQSPGRASSY

SEQ ID NO: 28295 - protein, 80 aa, Synthetic construct
VAKASRKLANDFPLDLSPVKKRTRIDEIASNLQSKINQTKQQEDAVINVEDDEEEEEDNEVEIEVELDREEEPTEPIIEV

SEQ ID NO: 28296 - protein, 80 aa, Synthetic construct
PQSANANEPQDSTVNLQSPLKMTNSPVLPVGSTTNGSRSSTPSPSPLNLSSSRNTQGYLYTAEGAQEEPQVEPLDLSLPK

SEQ ID NO: 28297 - protein, 80 aa, Synthetic construct
KMTNSPVLPVGSTTNGSRSSTPSPSPLNLSSSRNTQGYLYTAEGAQEEPQVEPLDLSLPKQQGELLERSTITSVYQNSVY

SEQ ID NO: 28298 - protein, 80 aa, Synthetic construct
SSRNTQGYLYTAEGAQEEPQVEPLDLSLPKQQGELLERSTITSVYQNSVYSVQEEPLNLSCAKKEPQKDSCVTDSEPVVN

SEQ ID NO: 28299 - protein, 80 aa, Synthetic construct
TAEGAQEEPQVEPLDLSLPKQQGELLERSTITSVYQNSVYSVQEEPLNLSCAKKEPQKDSCVTDSEPVVNVIPPSANPIN

SEQ ID NO: 28300 - protein, 80 aa, Synthetic construct
QSFDMFKDKDLTGPMNENHGLNYTPLLYSRGNPGIMSPLAKKKLLSQVSGASLSSSYPYGSPPPLISKKKLIARDDLCSS

SEQ ID NO: 28301 - protein, 80 aa, Synthetic construct; identical to SEQ ID NO: 9891

SEQ ID NO: 28302 - protein, 80 aa, Synthetic construct; identical to SEQ ID NO: 9893

SEQ ID NO: 28303 - protein, 80 aa, Synthetic construct; identical to SEQ ID NO: 8025

SEQ ID NO: 28304 - protein, 80 aa, Synthetic construct
HRKGKTKVCPHPGCGKKFYLSNHLRRHMIIHSGVREFTCETCGKSFKRKNHLEVHRRTHTGETPLQCEICGYQCRQRASL

SEQ ID NO: 28305 - protein, 80 aa, Synthetic construct
KHQAADNKAAAEWLARYWEMREQRTPTLKGKLVQKADQEQQDPLEYLQSDEEDDEKRGAQRRLQEQRERLHGALALIELA

SEQ ID NO: 28306 - protein, 80 aa, Synthetic construct
GMQATPATEGLARPQAPSSSAFRCPYCKGKFRTSAERERHLHILHRPWKCGLCSFGSSQEEELLHHSLTAHGAPERPLAA

SEQ ID NO: 28307 - protein, 80 aa, Synthetic construct
AFRCPYCKGKFRTSAERERHLHILHRPWKCGLCSFGSSQEEELLHHSLTAHGAPERPLAATSAAPPPQPQPQPPPQPEPR

SEQ ID NO: 28308 - protein, 80 aa, Synthetic construct
SRRKQRKPQQLISDCEGPSASENGDASEEDHPQVCAKCCAQFTDPTEFLAHQNACSTDPPVMVIIGGQENPNNSSASSEP

SEQ ID NO: 28309 - protein, 80 aa, Synthetic construct
ALMKSSPEERERMIKQLKEELRLEEAKLVLLKKLRQSQIQKEATAQKPTGSVGSTVTTPPPLVRGTQNIPAGKPSLQTSS

SEQ ID NO: 28310 - protein, 80 aa, Synthetic construct
TADQHPQARDSSGADQHPDSAPRQGLQVLTHPEPPLPQGPYTEGVLGRRVPVPGSTSGGRGSEIFVCPYCHKKFRRQAYL

SEQ ID NO: 28311 - protein, 80 aa, Synthetic construct; identical to SEQ ID NO: 9044

SEQ ID NO: 28312 - protein, 80 aa, Synthetic construct
PPKKPKSPKAPGTGRGRGRPKGSGTTRPKAATSEGVQVKRVLEKSPGKLLVKMPFQTSPGGKAEGGGATTSTQVMVIKRP

SEQ ID NO: 28313 - protein, 80 aa, Synthetic construct
PGTGRGRGRPKGSGTTRPKAATSEGVQVKRVLEKSPGKLLVKMPFQTSPGGKAEGGGATTSTQVMVIKRPGRKRKAEADP

SEQ ID NO: 28314 - protein, 80 aa, Synthetic construct
ATSEGVQVKRVLEKSPGKLLVKMPFQTSPGGKAEGGGATTSTQVMVIKRPGRKRKAEADPQAIPKKRGRKPGSVVAAAAA

SEQ ID NO: 28315 - protein, 80 aa, Synthetic construct
KQPIMADGPRCKRRKQANPRRKNVVNYDNVVDTGSETDEEDKLHIAEDDGIANPLDQETSPASVPNHESSPHVSQALLPR

SEQ ID NO: 28316 - protein, 80 aa, Synthetic construct
YRSPATPAEVANTPGILPSLPLLSSSIPEQLISNEMPFDALPKKKSRKSSMPIKIEKEAVEIANEKRHNLSSDEDMPLQV

SEQ ID NO: 28317 - protein, 80 aa, Synthetic construct
SRRKQSKPRQIKRPLEDAIEDEEEECPSEETDIISKGDFPLEESFSTEFGPENLSCEEVEYFCNKGDDEGIQETAESDGD

SEQ ID NO: 28318 - protein, 80 aa, Synthetic construct
GPSRGQGSEREELKALSCLRCGKQFTVAWKLLRHAQWDHGLSIYQTESEAPEAPLLGLAEVAAAVSAVVGPAAEAKSPRA

SEQ ID NO: 28319 - protein, 80 aa, Synthetic construct
EELKALSCLRCGKQFTVAWKLLRHAQWDHGLSIYQTESEAPEAPLLGLAEVAAAVSAVVGPAAEAKSPRASGSGLTRRSP

SEQ ID NO: 28320 - protein, 80 aa, Synthetic construct
LVLPSPCPQPLAFSSVETMEGPPRRTCRSPEPGPSSSIGSPQASSPPRPNHYLLIDTQGVPYTVLVDEESQREPGASGAP

SEQ ID NO: 28321 - protein, 80 aa, Synthetic construct
LAFSSVETMEGPPRRTCRSPEPGPSSSIGSPQASSPPRPNHYLLIDTQGVPYTVLVDEESQREPGASGAPGQKKCYSCPV

SEQ ID NO: 28322 - protein, 80 aa, Synthetic construct
GPPRRTCRSPEPGPSSSIGSPQASSPPRPNHYLLIDTQGVPYTVLVDEESQREPGASGAPGQKKCYSCPVCSRVFEYMSY

SEQ ID NO: 28323 - protein, 80 aa, Synthetic construct
EPGPSSSIGSPQASSPPRPNHYLLIDTQGVPYTVLVDEESQREPGASGAPGQKKCYSCPVCSRVFEYMSYLQRHSITHSE

SEQ ID NO: 28324 - protein, 80 aa, Synthetic construct
PQASSPPRPNHYLLIDTQGVPYTVLVDEESQREPGASGAPGQKKCYSCPVCSRVFEYMSYLQRHSITHSEVKPFECDICG

SEQ ID NO: 28325 - protein, 80 aa, Synthetic construct
HYLLIDTQGVPYTVLVDEESQREPGASGAPGQKKCYSCPVCSRVFEYMSYLQRHSITHSEVKPFECDICGKAFKRASHLA

SEQ ID NO: 28326 - protein, 80 aa, Synthetic construct
SNRTLKASLPRKRGRPPKSGQEPPLVQVQGVTAPVGSSGGSDLLLIDDQGVPYTVSEGSAAGPEGSGPRKAPHFCPVCLR

SEQ ID NO: 28327 - protein, 80 aa, Synthetic construct
RKRGRPPKSGQEPPLVQVQGVTAPVGSSGGSDLLLIDDQGVPYTVSEGSAAGPEGSGPRKAPHFCPVCLRAFPYLSDLER

SEQ ID NO: 28328 - protein, 80 aa, Synthetic construct
SDSDKPCKEEPMEVDDDMKTESHVNCQESSQVDVVNVSEGFHLRTSYKKKTKSSKLDGLLERRIKQFTLEEKQRLEKIKL

SEQ ID NO: 28329 - protein, 80 aa, Synthetic construct
FYRSLLTPGEMVSPPTSLPTSPIIPTSGTIEQHPPPPSEPVVPAVMMATHEPSADLAPKKKPRKSSMPVKIEKEIIDTAD

SEQ ID NO: 28330 - protein, 80 aa, Synthetic construct; identical to SEQ ID NO: 9099

SEQ ID NO: 28331 - protein, 80 aa, Synthetic construct; identical to SEQ ID NO: 9101

SEQ ID NO: 28332 - protein, 80 aa, Synthetic construct; identical to SEQ ID NO: 7891

SEQ ID NO: 28333 - protein, 80 aa, Synthetic construct; identical to SEQ ID NO: 6880

SEQ ID NO: 28334 - protein, 80 aa, Synthetic construct; identical to SEQ ID NO: 6881

SEQ ID NO: 28335 - protein, 80 aa, Synthetic construct; identical to SEQ ID NO: 6882

SEQ ID NO: 28336 - protein, 80 aa, Synthetic construct; identical to SEQ ID NO: 6883

SEQ ID NO: 28337 - protein, 80 aa, Synthetic construct
CDVALATEPECLGPCEPGTSVNLEGIVWQETEDGMLVVNVTWRNKTYVGTLLDCTRHDWAPPRFCDSPTSDLEMRNGRGR

SEQ ID NO: 28338 - protein, 80 aa, Synthetic construct
AVVSHHETALGLPRDHHMEDPSWITRIHERSQQMERYLSTTPETTHCRKQPRPVRIQTLVGNIHIKQEMEDDYDYYGQQR

SEQ ID NO: 28339 - protein, 80 aa, Synthetic construct
PSKSSSNSDRILRPMCFVKQLEVPPYGSYRPNVAPATPRANLAKELEKFSKVTFDYASFDAQVFGKRMLAPKIQTSETSP

SEQ ID NO: 28340 - protein, 80 aa, Synthetic construct
PSQPNSTKNQSLPKASPVTTSPTAATTQNPVLSKLLMADQDSPLDLTVRKSQSEPSEQDGVLDLSTKKSPCAGSTSLSHS

SEQ ID NO: 28341 - protein, 80 aa, Synthetic construct
PENGEYGPSSMGQSSAFQLSADTSSGSLSPGSRPSGGMEALKAAGPASPPEEDPERTKHRRKQKTPKKFTGEQPSISGTF

SEQ ID NO: 28342 - protein, 80 aa, Synthetic construct
ADTSSGSLSPGSRPSGGMEALKAAGPASPPEEDPERTKHRRKQKTPKKFTGEQPSISGTFGLKGLVKAEDKARVHRSKKQ

SEQ ID NO: 28343 - protein, 80 aa, Synthetic construct
LKAAGPASPPEEDPERTKHRRKQKTPKKFTGEQPSISGTFGLKGLVKAEDKARVHRSKKQEGPGPEDARKKVPAAPITVS

SEQ ID NO: 28344 - protein, 80 aa, Synthetic construct
EEDPERTKHRRKQKTPKKFTGEQPSISGTFGLKGLVKAEDKARVHRSKKQEGPGPEDARKKVPAAPITVSKEAPAPVAHP

SEQ ID NO: 28345 - protein, 80 aa, Synthetic construct
MPGKTKADAADPAPLPSQEPPRNSTEQQGLASGSSVSFVGASGCPEAYKRLLSSFYCKGTHGIMSPLAKKKLLAQVSKVE

SEQ ID NO: 28346 - protein, 80 aa, Synthetic construct
PRNSTEQQGLASGSSVSFVGASGCPEAYKRLLSSFYCKGTHGIMSPLAKKKLLAQVSKVEALQCQEEGCRHGAEPQASPA

SEQ ID NO: 28347 - protein, 80 aa, Synthetic construct
LQANHSVPDVAHPVPSPKPASVQEDAVAPAAGFRCTFCKGKFKKREELDRHIRILHKPYKCTLCDFAASQEEELISHVEK

SEQ ID NO: 28348 - protein, 80 aa, Synthetic construct
AHPVPSPKPASVQEDAVAPAAGFRCTFCKGKFKKREELDRHIRILHKPYKCTLCDFAASQEEELISHVEKAHITAESAQG

SEQ ID NO: 28349 - protein, 80 aa, Synthetic construct
AGFRCTFCKGKFKKREELDRHIRILHKPYKCTLCDFAASQEEELISHVEKAHITAESAQGQGPNGGGEQSANEFRCEVCG

SEQ ID NO: 28350 - protein, 80 aa, Synthetic construct; identical to SEQ ID NO: 7317

SEQ ID NO: 28351 - protein, 80 aa, Synthetic construct; identical to SEQ ID NO: 7318

SEQ ID NO: 28352 - protein, 80 aa, Synthetic construct; identical to SEQ ID NO: 7319

SEQ ID NO: 28353 - protein, 80 aa, Synthetic construct; identical to SEQ ID NO: 7320

SEQ ID NO: 28354 - protein, 80 aa, Synthetic construct
LLLPPRPPHPRSSSPEAMDPPPPKAPPFPKAEGPSSTPSSAAGPRPPRLGRHLLIDANGVPYTYTVQLEEEPRGPPQREA

SEQ ID NO: 28355 - protein, 80 aa, Synthetic construct
RSSSPEAMDPPPPKAPPFPKAEGPSSTPSSAAGPRPPRLGRHLLIDANGVPYTYTVQLEEEPRGPPQREAPPGEPGPRKG

SEQ ID NO: 28356 - protein, 80 aa, Synthetic construct
PPPKAPPFPKAEGPSSTPSSAAGPRPPRLGRHLLIDANGVPYTYTVQLEEEPRGPPQREAPPGEPGPRKGYSCPECARVF

SEQ ID NO: 28357 - protein, 80 aa, Synthetic construct
AEGPSSTPSSAAGPRPPRLGRHLLIDANGVPYTYTVQLEEEPRGPPQREAPPGEPGPRKGYSCPECARVFASPLRLQSHR

SEQ ID NO: 28358 - protein, 80 aa, Synthetic construct
AAGPRPPRLGRHLLIDANGVPYTYTVQLEEEPRGPPQREAPPGEPGPRKGYSCPECARVFASPLRLQSHRVSHSDLKPFT

SEQ ID NO: 28359 - protein, 80 aa, Synthetic construct
RHLLIDANGVPYTYTVQLEEEPRGPPQREAPPGEPGPRKGYSCPECARVFASPLRLQSHRVSHSDLKPFTCGACGKAFKR

SEQ ID NO: 28360 - protein, 80 aa, Synthetic construct
WDPMALGTQGRLLLDRDSKDTQTRISQKGRRLQPPGTPSAPPQRRPRKQLNPCRGTERVDPGFEGVTLKFQIKPDSSLQI

SEQ ID NO: 28361 - protein, 80 aa, Synthetic construct
RRKQQAVVVAEAAVTIPKPEPPPPVVPVKHQTGSWKCKEGPGPGPGTPRRGGQSSRGGRGGRGRGRGGGLPFVIKFVSRA

SEQ ID NO: 28362 - protein, 80 aa, Synthetic construct
PPPPVVPVKHQTGSWKCKEGPGPGPGTPRRGGQSSRGGRGGRGRGRGGGLPFVIKFVSRAKKVKMGQLSLGLESGQGQGQ

SEQ ID NO: 28363 - protein, 80 aa, Synthetic construct
QTGSWKCKEGPGPGPGTPRRGGQSSRGGRGGRGRGRGGGLPFVIKFVSRAKKVKMGQLSLGLESGQGQGQHEESWQDVPQ

SEQ ID NO: 28364 - protein, 80 aa, Synthetic construct
PGPGPGTPRRGGQSSRGGRGGRGRGRGGGLPFVIKFVSRAKKVKMGQLSLGLESGQGQGQHEESWQDVPQRRVGSGQGGS

SEQ ID NO: 28365 - protein, 80 aa, Synthetic construct
EYGLTDNVERIVENEKINAEKSSKQKVDLQSLPTRAYLDQTVVPILLQGLAVLAKERPPNPIEFLASYLLKNKAQFEDRN

SEQ ID NO: 28366 - protein, 80 aa, Synthetic construct
KDEEDNLAKREQDVLFRRLQLFTHLRQDLERVRNLTYMVTRREKIKRSVCKVQEQIFNLYTKLLEQERVSGVPSSCSSSS

SEQ ID NO: 28367 - protein, 80 aa, Synthetic construct
EQDVLFRRLQLFTHLRQDLERVRNLTYMVTRREKIKRSVCKVQEQIFNLYTKLLEQERVSGVPSSCSSSSLENMLLFNSP

SEQ ID NO: 28368 - protein, 80 aa, Synthetic construct; identical to SEQ ID NO: 3573

SEQ ID NO: 28369 - protein, 80 aa, Synthetic construct
WKLKRKANANQPLLTPKTDEVDNLAQQEQDVLYRRLKLFTHLRQDLERVRNLCYMVTRRERTKHAICKLQEQIFHLQMKL

SEQ ID NO: 28370 - protein, 80 aa, Synthetic construct
VDNLAQQEQDVLYRRLKLFTHLRQDLERVRNLCYMVTRRERTKHAICKLQEQIFHLQMKLIEQDLCRGLSTSFPIDGTFF

SEQ ID NO: 28371 - protein, 80 aa, Synthetic construct
VLYRRLKLFTHLRQDLERVRNLCYMVTRRERTKHAICKLQEQIFHLQMKLIEQDLCRGLSTSFPIDGTFFNSWLAQSVQI

SEQ ID NO: 28372 - protein, 80 aa, Synthetic construct
NFNKPLFPPKEDEENGLVQPKEESIHTRMRMFMHLRQDLERVRNLCYMISRREKLKLSHNKIQEQIFGLQVQLLNQEIDA

SEQ ID NO: 28373 - protein, 80 aa, Synthetic construct
EDEENGLVQPKEESIHTRMRMFMHLRQDLERVRNLCYMISRREKLKLSHNKIQEQIFGLQVQLLNQEIDAGLPLTNALEN

SEQ ID NO: 28374 - protein, 80 aa, Synthetic construct
KEESIHTRMRMFMHLRQDLERVRNLCYMISRREKLKLSHNKIQEQIFGLQVQLLNQEIDAGLPLTNALENSLFYPPPRIT

SEQ ID NO: 28375 - protein, 80 aa, Synthetic construct
MFMHLRQDLERVRNLCYMISRREKLKLSHNKIQEQIFGLQVQLLNQEIDAGLPLTNALENSLFYPPPRITLKLKMPKSTP

SEQ ID NO: 28376 - protein, 80 aa, Synthetic construct
VMNQGVAPMVGTPAPGGSPYGQQVGVLGPPGQQAPPPYPGPHPAGPPVIQQPTTPMFVAPPPKTQRLLHSEAYLKYIEGL

SEQ ID NO: 28377 - protein, 80 aa, Synthetic construct
GTPAPGGSPYGQQVGVLGPPGQQAPPPYPGPHPAGPPVIQQPTTPMFVAPPPKTQRLLHSEAYLKYIEGLSAESNSISKW

SEQ ID NO: 28378 - protein, 80 aa, Synthetic construct
GQQVGVLGPPGQQAPPPYPGPHPAGPPVIQQPTTPMFVAPPPKTQRLLHSEAYLKYIEGLSAESNSISKWDQTLAARRRD

SEQ ID NO: 28379 - protein, 80 aa, Synthetic construct
IQGQQIFTAHPQGVVVQPAAAVTTIVAPGQPQPLQPSEMVVTNNLLDLPPPSPPKPKTIVLPPNWKTARDPEGKIYYYHV

SEQ ID NO: 28380 - protein, 80 aa, Synthetic construct; identical to SEQ ID NO: 4888

SEQ ID NO: 28381 - protein, 80 aa, Synthetic construct
GAPLDGADPQALGQQNRGPTPFNQNQLHQLRAQIMAYKMLARGQPLPDHLQMAVQGKRPMPGMQQQMPTLPPPSVSATGP

SEQ ID NO: 28382 - protein, 80 aa, Synthetic construct
MSVAFASARPRGKGEVTQQTIQKMLDENHHLIQCILEYQSKGKTAECTQYQQILHRNLVYLATIADSNQNMQSLLPAPPT

SEQ ID NO: 28383 - protein, 80 aa, Synthetic construct
RGKGEVTQQTIQKMLDENHHLIQCILEYQSKGKTAECTQYQQILHRNLVYLATIADSNQNMQSLLPAPPTQNMNLGPGAL

SEQ ID NO: 28384 - protein, 80 aa, Synthetic construct
MSVAFVPDWLRGKAEVNQETIQRLLEENDQLIRCIVEYQNKGRGNECVQYQHVLHRNLIYLATIADASPTSTSKAMESGS

SEQ ID NO: 28385 - protein, 80 aa, Synthetic construct
ETVSLYLKANPEELVVFEDLNVFHCQEECVSLDPTQQLTSEKEDDSSVGEMMLLAVNGSNPEGEDPEREPVENEDYREKS

SEQ ID NO: 28386 - protein, 80 aa, Synthetic construct
PEELVVFEDLNVFHCQEECVSLDPTQQLTSEKEDDSSVGEMMLLAVNGSNPEGEDPEREPVENEDYREKSSDDDEMDSSL

SEQ ID NO: 28387 - protein, 80 aa, Synthetic construct
NRVHPRPLVKLLPKGVQKEQETVSLYLKANPEELVVFEDLNVFHCQEECVSLDPTQQLTSEKEDDSSVGEMMLLAVNGSN

SEQ ID NO: 28388 - protein, 80 aa, Synthetic construct
LLPKGVQKEQETVSLYLKANPEELVVFEDLNVFHCQEECVSLDPTQQLTSEKEDDSSVGEMMLLAVNGSNPEGEDPEREP

SEQ ID NO: 28389 - protein, 80 aa, Synthetic construct
IPGPLSLGEDFYREAIEHCRSYNARLCAERSLRLPFLDSQTGVAQNNCYIWMEKTHRGPGLAPGQIYTYPARCWRKKRRL

SEQ ID NO: 28390 - protein, 80 aa, Synthetic construct; identical to SEQ ID NO: 8079

SEQ ID NO: 28391 - protein, 80 aa, Synthetic construct; identical to SEQ ID NO: 2060

SEQ ID NO: 28392 - protein, 80 aa, Synthetic construct; identical to SEQ ID NO: 8160

SEQ ID NO: 28393 - protein, 80 aa, Synthetic construct
LSKVNEAFETLKRCTSSNPNQRLPKVEILRNAIRYIEGLQALLRDQDAAPPGAAAAFYAPGPLPPGRGGEHYSGDSDASS

SEQ ID NO: 28394 - protein, 80 aa, Synthetic construct; identical to SEQ ID NO: 1943

SEQ ID NO: 28395 - protein, 80 aa, Synthetic construct; identical to SEQ ID NO: 2055

SEQ ID NO: 28396 - protein, 80 aa, Synthetic construct; identical to SEQ ID NO: 8500

SEQ ID NO: 28397 - protein, 80 aa, Synthetic construct; identical to SEQ ID NO: 8501

SEQ ID NO: 28398 - protein, 80 aa, Synthetic construct; identical to SEQ ID NO: 1287

SEQ ID NO: 28399 - protein, 80 aa, Synthetic construct
IVTNPPDICQVVEVTTESDEQPVSMSELYPLQISPVSSYAESETTDSVPSDEESAEGRPHWRKRNIEGKQYLSNMGTRGS

SEQ ID NO: 28400 - protein, 80 aa, Synthetic construct; identical to SEQ ID NO: 2949

SEQ ID NO: 28401 - protein, 80 aa, Synthetic construct; identical to SEQ ID NO: 8366

SEQ ID NO: 28402 - protein, 80 aa, Synthetic construct; identical to SEQ ID NO: 2223

SEQ ID NO: 28403 - protein, 80 aa, Synthetic construct
ATVIHNPLKALGDQFYKEAIEHCRSYNSRLCAERSVRLPFLDSQTGVAQNNCYIWMEKRHRGPGLAPGQLYTYPARCWRK

SEQ ID NO: 28404 - protein, 80 aa, Synthetic construct; identical to SEQ ID NO: 1312
